United States Patent Application Publication US 2013/0096032 A1 - sequence listing, part 10

SEQ ID NO: 296 - DNA, 91261 bp, Arabidopsis thaliana
gaattcacaaatatttcatcatattatgtagtaaaaaaaacaactagtaatgacaatctattaacgctggtgttgctgagaatactatcccttgaaactttgactctcttagatcatcttctggtgctggtagattaagatccaacggtagatatttcctctgctgttccatcgaacggcctatattgatctcaatctcttcctctgtactgtttctgcttacttctgcggtggctgcaacggggctaatcgtggttacggctgtcctgtgccgcctcatgtgaccaccgagagcttgcccggaagtgaactcagaaccgcagatggaacactcgtgtactttgtttgccttgttgatgatgttacttgcctgtgaagctagggctgagccggaaactttgaaatgactgttttgcccttcttctgatgcactagacttgggttgcgtcaggggtagtctagtcttttcctcagtcgacgtcctcggcttcttgtggctcgctctgtgtccaccaagtgcttggaacgacgaaaacgtccggttacacgttttacactcgtacacatagaaactagaattctccgacgaaatcttctgatgaatttttctcgagttcttgagatccggcgatggaagaactgtcccacgagctaacatgatgagacaaatcgccatgtcttcttcttcttgcgtacaatcagtagtcaccggagacgaaaccgccgagttgtattcatctgaaacagctctttctcctccacttccaccggccgatgaacttgttgaagtcactgttgtcgccgccgtcaccacaaacgtcgaagacgatctttgtcgcttcgtacgtttcccttttatgatttgcgtctgatcactcccaacctcatcttgacccatcatcatatccaaatatagtaagaaaagaagaccaaaacccaattcaagaaacaaatcaagaaacaaacccaattcaagaaacttcgaaattatggagaagagaatgaaatctttggtgtttattatgtggagtgaactaacaagagagagacagaagagaagagagaagagaggcagtgaagaagacgatggtggggctgcttatatatatatttatcggaaaaaaaaagagagaggttataagtttggtggttgttaatctttttagtttactccacaaaagattttacacatcgatccactttacattattataatgtttttagctaaccaataacattttgacggttcactctatacccattacctgacacttctgcgttttctctgccaaattccataacaataaaatcaatcaacaaatttataattcaatgatgaaaaaaatatgacatgtaaataatttttcttcttttctagtttctgttctgttgtatctacttttaatccatatcttcaaaatctgatctctacctagatctatataccagaagtcaacccttcatgacgttttttcatttattagtattgtattagacagcttcttctagtacatactttctaataacaaacatattaatatcaattggtgtgattaatcaaactcttgaatcattcatattccataattaacagagaattgttattaattccgagtgaaaatgattaatattgtttcaagcaaaagtaggagaaataaaagggaaagtgaaacccgtgaagagttaaccactgaattaggcaaaggttcattagtagtgttgagtggcacttaggccaccaattcacgtttttgttatttgtttttatttatttagtttcgaatttaatttttgggagtgtgaacattcagttctaaggacaaagcaaaggttttactttcacgcactttaggtccacgtcatcaaatcgacgctttcaatgagaaccgaaatagatagaactaaagataaaaatgttcacgacagcaaataaaaagaatatattacatattattaatggtcgtgacgactacaagaaaacttttgattaaatgttttgaaatatactaataagattatcaaagggaaataatgattcacagacatacatggttcataattaggaggcgacatgcagtggccggtgtttataggattaggtgcattcatcggtggcatgttaggctaaaaacaatattaagcttagtctttgttaatgtgaagagacaacaccacgacttttttttttctctcattttttaatcatatcttgattaacatttgtagagagagttgaaagctagtgctcaattggttatctactaatcttaagactggaaacagttttaagataattagagatctatttttacaattgagattaattaacatactcaaattataggccgacaaaaaaaaaaaaaaaacatactcaaattatagaaattttttatgtaacattactttattgtcaaatattggaatgttacatttttgtatggacaagtgacaactaaccattaaaacgagtttacacggtacatccaaaaataatactttatagattatagaataagtaatctatagagaaaagttcaaaaaaaaaaaaactatagacagagaataagttatgtcaagattgagagaccggaaaattatgaagtttagggacctcaaaataattatttaatttagctaggcaaactagattaaaataatttattctggaaaaattatacacctttttttgtcaacatactttcaaagtctcacagtgggagattgaggcttgaacccatatctatgcataaggtataatgcatagtggctaaaccacaccacaaaatccttgtcaaggactctttttaaaaaacaaaaatccctgtcaaaaaaaaagaaaagaaaaagaaagaagaataataataaaatatatttatttttaaccacttctaaatattagtatgataatcatatcacttactttaattttacaatcaaattttggtttatatttttcataataaatatttttataggatctaaatatggattttgactagaaaaatataattgtctttacttcaaattggaaaagaaatgttagagtaaattcatttttgaaggaataataattatattaaaaaatattctcttaagacaaatggtatagaaatttatataaattttcaagtggatatatataacataatttttgggctaaggaacggttatgtgtgggatgcaagtatgttacatacacaaaacccatcacttctttccttcaccgtaatattttgctaatttcatgcaacattttgactttacatagggattgctgctcccatatataatatgtgtgccactatggactataaatactcatgtttgtttttgtattgatgtatgtgtatgcaactaaaaagtgttacaacttgccactggaatataccaatttataccaattaaatgattacgattttgcattatatttactttttctatagccgcaagtattaaaatttaatcttgatagagaaattagacttattagtaagtcgtaccatataaatgctaccgttaagctatagtataaaagaaaggacctagttatttttattaataaagatttgattaggcgcaataattctataacacgatgaaatgattggaagaagttactcttaatcacgttgggctattccaaaccttattgtcttgtacttaaagtggccctcacatcctttgcacaacaatttaatagatacactcacacatgcatattcatattaaaaccattatgtatttagtggtcctaacaaaactaattatatcggtttcagttttacagtcgagacgatacacaaccatgtactcattacgtatacatgtttagatacataatgaggaaataattgaaatgatttggttgctaatcataaacaagaaaaaaaaacagtaaataaaaaattaggagacaatagaagagatgcatgatgttgcgtaaagcaacgacaccaacagatgtgtggctaaaagcaattagttttttactcaccgcgttatatttcctaaaacataaattagtatcctctctataattttacataaattggatttctctgttttaattagtacatttggtgaaatgttaaaatatggtacaacgtatagactatagctctataaaaattattataagaagaaaaagccgtttttgctaaaaaaaacataaaaaaaataaagcaagtggaaaaatagctaggacgaaaccaagtgattatgaatttaaagatcttaaacaagggataaggatggactcattcccaaataagatcagcactcgaaacacagtggatgggaacgagcttatggttgatagttttaacaactttaccggcgcttttgcatcgaccatgggtaattcatccatttgaatttatccatcaagttgtttgcgcttttatattatcataaccaaacatccttagagttggtcgaaagaacaaaaattaaatataaaagatggcgttagataagaatcttctaaactatacgtgctaattgattcacctaaggtaaggtacttcggttcggttcagttatttcggtttgatttttttgtcccaagctaaggtaaggtatacatggcgttataaaatttgtctaagctaaactatacatggcatgacgagattcttccaaaaataatggatgatatttaaccaaacatatatatatactcctatttagtgtttcttatttttaaaataattaaattaaagtgagtttaggtttgcaactaatagttatacgcatgtcaatttatcacatgctcaaggatcaaagcaacgtaaaaaactattctatactatcatttattttcatgttacatatatatactgaatttttgaatttttcagtaaacttttagtaaaatgtcatcactagctactagctagaattaatagaataaaaatctaacacatagataaatggagaaaacaatttttattccactcattcttcaaatatagtaatctagatcaatacatgttttagagccggaattcatatttaagaacttatttgttttaacaataattgagttcgtggcgtccttctatatacctacgttttatggtttaacaaactatacgtagaagtttaaactcaccaatgtctattgtctagtcgaagtctttttgattaagaacaaaataaaaataagactgaaataatgaaagaacaaagaaatagataaatatgacgtacaatgttgaagatactagtatacaagaataatgtaagttagcaaaacagagagagaaagaaatacttagcgtaagaagacaaaggagaaggaagtgtgaggcacgtaagggttaagatgcaccgccgccgcatctttagttgtatcatccaaccaattacacaactcattccacttatttttctaaatatatgcttaaaaaacatttttttcgagaaaaataggtttagaaacaactatatttaatcgcatgtaaatgctcaatactactagtttatttcgacggccaagacgagtttaggctactgattacagattttacacagttggttagtctttgtaatttttattttcttttcgcgtctaaacaatcgttataaaaatttaaacgattttgaaaaatctacagtaagttatggtataaatattttatttctaaataacagccaactcctttctagtttttcataattattttatctaattttaattggttggtatgagtctggcattacatgtgacatagcttccaagttaggattaaccaaaagatcttatttctacaaaaccggatccaacccactctttcgcttgctttacttcacttgcaggttgttgttttcctctcaattcccataacaaatagtataattctatcttagtttatatgtggctcttataaaaaaatcatttattagttgtaacctaatgataaatcaaacttaaaatatataaagtcatctaaaataccattgcttgatttgtcaaaagcaaaaagctttcactttttgttaagatgtgttaggttttaatcaaagaatattaagatccgttggaactcatttaattgcatatctaaaatggtgaactttagaaagactaccatatttaagctatgtaaaatcacttcttcatttcaaaagcatcctaaatctacatacaacttagtgatttcaagttctaccaattgattcttcatgatcacttttggttagtgcttgtttttttttttcccttataacaacaaaaagttaaaaaactagtattgacttctacttaaaaaaattataactaaaaaaaacacaacaaaacatatacatgcatgtttgtctaatgaaagaattaaaaggcaagttctttaaatatataaaattaaaaataaggtgagaaaatgggtggcataccaaatagtagagaagagagagtggtggtgggggctttaagacattatatataaaaaagaagtttttgtcaaaaaaggagtggatagacacaacacaacacctcaccacacttcaacactacaacaacacctcactctcttacttcttactcactccacttcaccacacacttcttctctcttcctaactagctgtttcatttatgtatttcaactttattcatgccattacccattattcatgtttaatggaaagcatcatataatttaaaatatgatttgtattttttttttttttgtaaactgtaactattcttcaatctgttgatcgagtaaaaagtaaagaaaaacaagattcaacacctcagttttataaaagttatatcatagtaaaacaataccagttgtttttatcgatagtaggaatattgttcatattagtttacgattttaatgttttatctttgaatagttagttaatcatctacgatccactactcgaaggataagcatctagatcatatcatcttagtcttttcaaaaactttttaaattattcttttgaataatataattgaaatagtaagatagttactttgccatcaatcaatttgtatagtccttgaaagataagaaacacatcaatcagaacctaatataaatgtattaatatagttaatacctaatataaataacagaaagatatgtataacttaaaatattgaaaaaagaaagataaagaggataatgtaatgcaactaaaatccaagcaaaaattatggctctacgtctacttgttgagtcttgagtgttagtataaactacatatgagtgtctctgtgtgtatgcatgtgtatatctcatgttgtgtagctgtcaaaattagctagaactatatctctcatactaaagcttttctttgttatgagtaaactaaccattaagcctgttgtaactacttagtattaagtcttgtgaggcttggttttgattttgtgatgctaaaccaagatttggtatttacttaaacttttggatttagtagagagagtcatacgttggtgagttatcagtctattgttcaacttaaaaactttttggaccaataaataaatgagatctgaaactcttgaaacccataaatagaagtcacatcaattgtgtcagaaaaatccacaaaacttctcttgtctttctttttttagaaaaacatgggatgataaattgataactatgtatagtctggcacttgccatttggctaagctcatcaacttaaaacacaatttgaaaattccaataattgttgaaccaagtcagattttccatagaagactttattaatgaaatgatctcaaaatatgtcaaaagaaagaaatacatattcatattatatatataatcacaagttgcctagggaaaattctgaaaaaccaaagattattaatgtaataggaacatatttatattatttattaataaggtagttgaagtaacagacagacggtttggaagacacatacaaattggaccaaccaagtgggtaagctgatcctctttttactacaagcatctttataattatttaaaaattatcattttaaccatgtttatattctttaaccaaatttgtttttcgaaaatatgtttatattcatgtatgtgtatataataaaaatgaaaatttacataaatcaaaaagtgagtgacggcgccttttccattccggaaaaaaatgttaaaatgttgagtaagcaagagggttaatgattcgtctctgatattgaacaaaatccaattaactcaaagtcatgttttttccataatttttgggtggtgaataccaaacacttacgaatcatttgctcacatgacattgacatagttacacatattaatttgttataaaaatcttttactacataatcacaatatctcaaattttgtgatggaatcacaattagagatcaccatttatctcaagctccaatattacaattgctttgcttccctaaaattgtagaatttaaaatttatgacaaaaatgcataaacccacgactttgcaattatacttactcacatgttctaagttctaacaactattaccattttaaaaactttctatcgcaatgttacaatacacctattcttttctgtcactttgttcacgtgtttagttttcagtttgttacaataacacaagttggtaaggatatgcttatcatcaatatctttaaacctgtgttaaagtcgctttccctaaaaacgaaatcaaacgcatgattcatcacaatcttgaactgaataaaaaggatgctaaataaaccaaaatgtacttaaacgatcaaacacaaagttgtatcaaaagtaaacacatcactgtcacaaattcaaaaagagaaaaattgatgcaatgaacataaacatcaaagtttattaagccaaacattatttgctaagattcttacatctgttcaaacagacaagatcaacacagtagacataagagtacttgcttagcctctgacttagagcggcgtcaagccaatcacacctgcgaaagaaccaacataactcgtgaggataccgaaacagatggtccgaatttgcgattaaacgttataatcaagtgtgttttcttcgaatgaaaccacaatttttggcgtttgaaacaatcgcagcctaagtcatagtgatagaaagtttaaacataccacatgccaatctcccgcctgcgtttccagtggtcagactaagctcatggccacctatatttgtcaaatcaaagagagtaatatcatatcataacttggcttaagagacatttataagctaggaaagagccatcctttttattaacaattcattagtgcaaccgtgccaattgatgtatcgagacttggaagtaaagtataatggtttaccctttccgaggtcatccttaagctcgtgaaccacaaaggctcttccaacaacagaattaggaccagtcagaggaatctacacaatcaagttcacagtaaacaaaagcttcttataagagaaaatatgagaagcaatatacttcttataggaaaaacatgcgatagcaccaacctgattgtccactattgttgtttctgccacgcctgttgttacaaaaacagtacttagttcaaacaggtttttgattatcgaagacagccaaattgtatgggaacttgaatggaggatgtaaaataccatcggcattggcatttatgtttcccaggtcacccgcatgacggcactcatcttctggagctccgtgtgtcatgttgttagggttgaaatgtggtcctacaagaatataagacaagatatcgtcttagaatttggcaaatcatgacatcagtatcaaaagaatctgccacaggggttttgctattaacctgttgagatacatccattagttgtatcaccaaactcatgctgcaaaatcaaacagaggacataattacaccattatagctataagaagaacagatgattcattcttccgaggaggaacaagcttacgagatgaaatccatgaggccctggagtgagaccagtgatacgaacattcacagttgtaggacctgcttgccataaacacaaccatattcacttagaacaatctacatagtcaaaaattagcaagaaaccatatagggttactttgtaaactttcacagaaccattgaatcagcaagaatatgcaaaacactcttaaagctaatccctttctttatcagcttatcttaagttattcatagcagtgagaaccaaacactaacaaatgtaactcaacagattaaacagaaaaagtctgaaactttgaagaaaccgaaaatcagatatgaagcagattaaacagaaaaagtctgagactttgaagatattgaaagtcagatacgaagcagattgaacactgagagtgacctaatcatgcccatcaaatcaatcttcagaaacccagatgagaaattagagattttgagcaattgagagagacggacctgagtcatcttgggtcaaagtaacaactccttcgacatcagaagtacctttaagcactgcaacagccttcttcgccgcggaaacaactgtcaacgctttcgacggagctttaacggcgaaggaaacagattggagacggtggagattgttgttgttgagagagacgccgcggaaagaggaacggagagttgaaggattggaggaaggaggaatgagaagacgagaaggagatgagaatgcgaggattgtgttggtggcagccatggctgctgctatgtttgacgtttggaggaaatgagtaggcacaaatacttgtgtgagattgaaagatgaggtttttattggtgtcactggtttctcaaattcggcccacacatacacaatttttttttttttttttgagtgcttctttaccatttttccaactttaggacttaaaatttgattaatttctacactttattagactttttttcttcactttattgctacttttgattggcaaattagttcttaaaaaaatataagtatatgttattatcttatgcgaaaatgttaaacttgccaatatattttgaccaatttagtgacaaacttggcatgaaactatctagaaatagtttcctatcttatgtgtgaccaaagctgttttcattcatagaaagacagtcatcttatttaaagaaattcctttttttctggtagattcttagttgacttctttctgtggtttataacttataagaagctgaagacatatactatttatagtggagaaacaactcaaaaagggtctaaaactacatatgtctatagatgtccaaagtgtgttttttaaaaacagcataacctataaacagcatatacatctgtgtgtcatttgtttacaaattgtttctttgttatcaaaaggaacacaacatttattttgttatcgtcttccccattttgacaagaactcacttaagattttgaagtcatggaaatggggaacgggacaggacccgggatgtcgggggcttttagtggaggcggcaacgagattttgggaatgggaggtggcggcggcataatgggaggcggtgatatttcacatatgagtcctgaagtaaaatggatatttgagatggcttggtatggtgaaactgtaagatatgatgggttaatttgtgaggagcatccccctaagctctcttcagatggtatttgggagaaacttattattaaatcggcaggtctatatttttggcaatatcgtcttccgaagctcgagattgtcatcttgctcgtcttctttctttggcaaggctttaatatcttgtttaagaaattgggtctttctattcccaagttatcctctatgatgcttgtgagctcttcttcttcttgtttgtcttttttttttcttcaaaacttgtgtgtttgctgctgagaaaatcgatgttgcattgcaggcagggctactcttgaatgttctagttactttatcgggagagaactcgatcattgcggatatcttggtcacgaaaaacagaatcgacgtagcaggatgccttggatcatttggattcttgattttctggttcctcaaaggtgtaagaatggacgtcaagagaatcttcaaggctgaagcaaaagcaagagtcactggagttgcagcggttactttccctatagttgttggcttcttgcttttcaatctcaaatcagctaagaatcgacctctcactttccaagagtatgatgtaatgctactaatggaaagcatcacgtccttctcggggatcgcaagactcttgcgtgaccttggcatgaaccattcatctattggccgggttgctttatcctcagccttagtctctgatatagttggactcctgctcttgattgcgaacgtttctagaagttcagcaactttagctgatggtttggctatacttacagagataaccttattcctcgtcattgcatttgcggttgtgaggccgataatgttcaaaataataaagcggaaaggagaaggaagaccaatcgaagacaaatacatccacggggttctcgtcttggtttgcttatcttgtatgtattgggaagatcttagccagtttcctccacttggagccttctttcttggtctcgccattcccaatggacctcctattggatctgcattggtcgaacgattagaaagcttcaattttggtatcatattacctcttttcttaacagccgttatgctcaggactgataccactgcttggaaaggcgctttgacattctttagtggcgatgataagaaatttgcggttgcgtctctcgtcttgctcattttcttgttgaagctctctgtctcagtcattgttccttacctctataaaatgccgttgagagactctattatccttgccctaataatgtctcataagggtattatcgaactcagcttctaccttttctctctaagcctcaaggttagttttctcatattttgattcttgatcatgattatgatttcttgccaaaaacaaaaagttgaaaagattcattgttttgattcttttgattgatgatttggtacagttggtaaccaaagatacattctcaattctagtcttgtccattgtcctcaactctctgctcataccaatggcgatcgggtttctctacgacccatctaaacaattcatatgctaccaaaagagaaatttagcgagtatgaagaacatgggagagctaaagactcttgtgtgcatccatagaccagaccacatatcttccatgatcaaccttcttgaagcttcttatcaatccgaagacagtcctctcacttgctacgtccttcacctcgtcgagttacgaggtcaagacgttcccactttgatctcacacaaagttcagaaactcggagtcggggctggaaataaatattccgaaaatgtcatcctctcttttgaacatttccaccgttctgtctgcagttccatttccatagacacattcacttgcatcgcaaacgcaaaccatatgcaggatgacatttgttggctagctcttgataaagctgtcacgcttatcattcttccttttcaccggacttggtcacttgaccgaacatccatcgtatccgacgttgaggcgatccgatttctgaatgtcaacgtcttgaaacaagcaccttgctctgtcggcattcttatcgaacgccatctcgttaacaagaagcaagaaccacatgaaagccttaaggtatacttacaattacatctactatgcttccatgttggtcgttgtagatgctttaactatatatatagaaaaactaagcacactaagctatttgatgataggtgtgtgtaatattcgtgggaggaaaagacgatagggaagctttggcctttgcgaagcgaatggcccgtcaagagaacgtaacattaacagttctacgcctcctagcatcaggaaagagcaaagacgcgacaggatgggatcaaatgcttgacacggtggaactaagagagttgattaaaagcaacaatgccggaatggtaaaagaagaaacatcaacaatttatttggaacaagagatattggatggagcggatacgtcaatgcttctacgttccatggctttcgattacgatcttttcgtcgtgggaagaacatgcggcgagaaccacgaggcaaccaaaggtatagagaattggtgtgagtttgaggagcttggagtcattggtgatttcttggcctcgccggattttccgagtaaaacatcggtgttagtagtgcaacaacaacgaacggtagccaataataattagaagcggagaaagcatactatggttgtggttgttgttacatctatctctcctttgtgtagcatctacaaaaagaagtttgaaaagaagaaaaaaaatgtatgaccacattttatttgtttttttcattgctacttgtggaatattgttttttgtagagcagaaagaaagactttgaagaatgttttaatccttaaattttcctatccgaatagtctcctagggtgaataattataagaacgaaaaatagtttatttactagaataattgaaaatttcttattagttactagaaatagtttcatacttagtttactttttgaagctttcttacgaaaattagagttcgtaatcaaaaggatctagtggttgagggctcgctttgttagtcaaccttacagtttttggctatttttgatcacttttttgtccaaattccatttgcgaattgcgaccactgattttttttttttacactttcatataaggcaagtaacacgtctagtatgttaaataagcttttaaaactttttttaattgtttttttactaagaaaaacatcaatctcaaacatctaaaccctatgacggatccgaaagactgatcttggacacaagaaatgaaattacacacattcctatatattatatattgatcatcaattagaaatgattctctatttcttaatctatcttaacctaaatctgaatctcgatcattaaacaattaccgtacaattataaccaaaccgttatggtttactgatcaccaactgaaattacatcgccttgtatagatttgagtgtataaaaggagtttcactaattttaggataaacatcgaaatctatctgtcctaacccctatttaatcagttcaccaagaacacaagaaccgaaacacctgcaaagttgtttttatatagtcatgtattaaaggttaaatataggatatctttgttgtaccaaaactcttaaaacaccttttaaaatctaatattttttaactctcacaccatacaacattgttactatacatcctatggatcccttcaatgcgagttggtggaccaatatggcctggcacggctattcgctcagcgaggacgggactaagttctgtgagatgcttccgactaagatcaactctttcggtttgtcggagaaaattcttcacaaatcagtagggttgtatttttgggaatatcctctacccaatctagagctcattattctctcggtatttttcttctggcagttctttgagatcttgttcaaaatgtccaatattcccattcctaaaatgccttccatgatgcttgtaagtagagtgattgtctcttaactttcaaatgattaaggatatttccaaagaaaattcaaaagttattttccgattttgtgtttaattatttgtgataaaagaatcattttataatcctcattcaaaatttgattttttacgatatatatatatatatatatatatatatattaataattacctcattttgcgcatttttgttcattcaaaatttcacatttttaaattacaagcattttatatttggataattgtaaaagtttctcatttagtttgtgctttttttttttttttttggcaaaaagaatatcatattacaccatgcaaacgcaaaacaaacaatgaatgtgattttgattacgtgaaaacaattgtattgctgaaggggtgtgtggtcatcaacctgttttcttacaccaggccaggctctttgcttcatcggatgtttttcccggacgacgggaggccaaaggttgccgagaccgggggtgcattcgggtttgtaatgtactggttccttaaaggcgtgtctatagacgttgggatgcttagaaaaaccgaaccgagggctgctttaattgggttcaatacattggtcatcccatatatatccggttacattctaatgaggactaggaaacattttgggaagttggcaatgacggaacttcaataccaggaaatcatattattgcaaagtttatcatcatttgctggtgtgaatggactcttgacagatctcaagatcaaccattccgagtttggacgaatggttcagtcttgtgccgcggtcactgacttagtaatctttataatggtctccgggaccgttcttttaaaaggacaaaaaggtttaccacatggtattgttatcgttttggttataggcttcttggtctacatcgtatggccggtcatgttatggattatcaagcagacaccagaaggcaggctggttaaagatgtctacatttacttggttatggctaccgcatattttgtttacatgttttggcttaatttctttcaattctcaacatatggctggtttattatcggtttggctaccccggctgggcctccactcggatcggctctcattcaaagatttgaatgttttaacgttggtgttttgttgccgctctttggatctcttagcatggaacaactagatatatcgtggttgatgcgagagatactgaaccttaaacacatggagggcttcgcttatgaagctatttcggttatcttgatcgtcaccgtggttaaatttgtcgtcacagcaataactgcttttgctgtgagaattccataccgagactccattgttttagccatggttttgtcaaatagaagtatctttgagctcggctacctcggctacattgtcgaacttaaagtaagaactcaattatgtttcaatccttccattttttttttacatgctacaaatttaggggtgttcaacacgattttagctcggtcttagtttcagattttccgttaatgaaccataatatgcaaagtacagcatgatctgttatagatgatttggtatgatttaggttcgcattcgagttttagtcacatatttctttaattttcaaagaaatttcggttttgatcgtttttctctccttcctttttttgtttgttttgcattcggattcattttgcagatatacatgcaataggtaaatgaatctattaaaccatatagattcatgattcatttttcaaaattatgatttcctgtttttggaccaatcacttagtataaaaccaataccttaagcattaacacttatttgttaaatttaacatgttaaattgttaactcttaaatttcaaacgtagtaaaataattttggatctttttttttttaacatgtaatggcaaacacataaaaataaaatattgaggttcaaaacaataacaaacttattgatccatctcactacatattaacaacaatccattcttatttttaaaacagatgttcgacaacaagagcttcacgatcgcggctctatcagtacttgtcagctcgctattgacaccgatcgcgatagaattcatgtacgaaccacaacatatctttagtagttaccgagataggaacatgttaaccttgaaacatgactctaagctgaagacccttgtgtgtattcacaagcctgaccacataacatccatggtcaactttgtggaactttttaacccaacacaagaatcaaaattagaatgcaatgttcttcaccttgtggagctcataggtcaggccattcctaccttcatttcccacaagatgcaaaagccgaaggttggaacacgctcttgctcccgcaatgtcataactgcattcttaagccttcgtagacatttaaccaaagaggcaatttccattgacatctttacatctgctagcttggtagagcacatgcacgaggacctctgttggcttgcccttgacaagaatgtagctctcgttgtacttccttttcaccgttcttggtctgttgaccgctcaaccattgtctctgacgacaaggccatgcagaatctcaaccacaaagtcttgaaaagagcgtcttgctctgttggaatcttcgtctaccggaaacctttatgggaatctcaaatgcacggctcatgttacaaggtacttgttttttttcttttgtaattaagagatctcatggttaatttttggggtcgtctggcttccaactcaaaacaaaccgacgattagtatatttggcccatgttttttctatactagtgttggtacctacacatttcttccgatgtgtgatcttaacaagttctaaactggtctcgtggtttgtatttcaggtgtgtgcaatagttgtgggagggaaagacgataaagaagccttagcattcaccaaccgtatgaggagaaacaagcagacaagcgtaaccatcttacacctcatacctcaacttactaccgaggaaagcgaagactcggtgcagaagttggattacgatgacataaaagagataatgaagactgaggattcaaatgaaaatgattcatggatatgtatagaaaaaagcgtcaaagaaggggctgagacttcagtgatacttagatcaatagcgtatgattatgatttgtttatagttggaagaagtagcggaatgaatagcgcagttacaaaaggattaaatgaatggacagagttcgaggaacttggagccctcggagatgttatagcgtcaaaggagtttccttcaagggcatctgtcttggtcttgcaacagcaacaatattagaatctttttgttttaccatgttatgaatatccaaagcacaaattaggttcctagagttgagtcggcgatccatataggtcgtctgtactgctttctcggggttaaaattctttattcttttaccaatcaaacagagaacaatacatagaatcaagatgtgaatggtcttgcaacaacaaagcaataatacagccaatgaaccaaaacgtgatatatcaaagcaaaagaaacttaagacttgagactataaacaaaacataaatattacttcatttaaccatacaatttgtcgctaaattactatataacatggtgtttattcaatagagaatcaacaatctcggttacatcatcactagaatagaaattagagccctggaagttatgaaacatgtaagaaaggtacacaatcaatatagtgcagaaccggatttgactcacgttagagcaagcgttatagaatcaagtaaatgacttgatgaattcaaaaccttgatttaaaagtgatccagtgatccacagcttcaggttaggcaagtttaagctctgttcgaagcatgtcccctgtttccaccacacaagaaaactcggtaagtaaacggtatactcggaaacaaaacaaagtaaaagggcacaagttgatttacatctaaggtatatgttaagaggtatgtgtccggagaaggagagcttaggttagagttctgcacttggaaacttgtaagagactccaaagacttgtaaagagatggagcaacaccttctcctttgttacacaccaatctcacataaaaccctttctcctccacttgtataacatccatctaacacaacaaaacatacaaactttaaacactttgatgtttcaagaagattgattggtttttttaggttattacctgaatgatttttttggaagcaggaggattgataccgcgaaaaggttgagtcttttgagcatcaggagcatgttcttggtaccctccagtagagtttaaagaagcttcaagacccgcgatatcggatttgagtttcttcgcttgtgactgaagttcttgaacatacaacactgcatctccaacaatggatgctttatccatctaaatgccaacacacacatacttcatcaatatttacagtttcattagtcattaccaaatcttgaaaatgttgtgacttaccttagtaatattgggaacaagagatctcaatgcataaagcttatccttcatacgccctctccttcttctctcagagatcaaagtcctagaccgatcagtcttcgtcttacgggtcccatcattattcgtagtagtggctgaagaatcatcaccgtcgttgtaatcttcttcatcttcttcaccaccggctctaacactatcaccgtcgaagctacggaatgattcagcaacgttggagtctaagtcaggcaattcgtcgaagaggtcatcgacaggtgttgggatgaactggttctcgtctatgaaacaggggctgttttgtaatggaccaagatcgaaatcaagaactgggttttcgtcaatggtttgatgatctcctcttatgaggtttatgaactgatcgaagtttggatcgaccaagaaattgtgaagttcgagatcgtttatgtttgacagagcgttgactcttccttccatttgtgtgtttttgtcaatgaagaaaagttgttgacaacgaaagagagacaaaatgagtttatataatagagtgagtatgaaataaactgtattaattaacataataagttaagaaatcaattaaaacaaatttaaagaaatgtactcttgatagttggttgatattagtttattcagttacgtcttgtaatgtcatgcatgacctgtatattatatgtataaattatgttactcgaatgattaatttgtcgtgttgcatgacaattatatttccacattgttcttctttatattttatcatttgaatttttttttgtggtggagggaatgcagattagaaacaagagtatatgttgatcaaaaaaaaaaaaaaatatatatagaaataacacacatttttggtcatgtctttattgggagaagttttttaaaattatactactttccaaaaatatcatttttatccattttcaaaaataccacaaatatttagagttttttaaagttataaaatataccaaaaatattactatataatttagtttatgaatacattattatgagttttggttattaagaccttatataggcatatagcatgtatattaagctcataatatatcctgttactatataatttagtttatgaatatatatgagttttggttatataaataaataaatcgatcagaccgtattaaaaaggtgttcataagtaaaagtttactacgatattagacgtacaaatgttagtgtactgtttatatttttgaatttagatccacatatattcttgtttattaaaatgttaggaattaatttgcaatcggcttattacaactgtagatgtcaactggtttagttgtcacaagctagaattttaacaaaagtttttctcaacatttttatgttagtgtatttaaaaagtactccaatatgataaatatgttttgtagaaaaacggccaaaattaatttcaaatataaacttaaaccagcataattttcaaataacaaaccaactctggaatataatagcatttcaattattttcttttatttttgataaatgcatttccatttttcaaatcatttaaggataaaccgcaattaaattatgaagaagcctgttcaatgcacggttttcgttcttgtctcaacaaacaaacaaaggatagcaaagaaagacagtataaaatattaaagtcttggccggttaggacaaaaatcaactctttataatatttcaagttggaatattttttcaggtatataactgtaaaaaaaaaaaaaaaaaaaaagtcaaccaattatagattccatctaggtgttgaatttattagagaaactgaacttttgagcaacattggatttttgggatactccacaactttcaaaaacatcaaccaatttccaaataaatatttgaataatgctattatgtcaatttagtagatgtttggttagatcgtggctgtaaatttcggtctgtaatgtttctgatataatcttatttttgctgtaaaattttttttcacatatagcctctagagtttaaaacaaataaaaattgttgtaaaaacaattcatgaatatggcatactttggttcaaatatatttgatacatgtgaagctagcataatttttactgaaattcttcctatttcgttttttttttgccacatgattatctttcagtactccaacaaatatgacaactctttttcttttcttcactaattgacatttggaacaaatacaattttgctgtacctatcacatctttagaaacataactctgaataagtcacaaacttatgaagcaaaatattttgacaaacttttttcttttttccttttctttttcctctaacctttatgcatgtcaactagcagataacttttaatttgttcaccccaacaaaaatggggaaaatatgaaaactccttttcttctctatacagacatggaacaaattcaatttttatgtgacttatcagcacatctttagaaacacaacagcggataagtcatgactcatgaacatcaataaagtattgtgtcagattttcagataaccgtaactatcggttacaattttgaaaaccgaaatggcatggattcactaataaaaccaaacctaccaatgaccacaccaatcagtaaacaatgaccacaccaatcagtaacagtggtccatccatcttcttctcatctcacatcacatcaaaacattaataccttttgttaccaaacttttttttctcaatttacttacaccttttctctgcccaataccaacatttagtgctctctctgaaatctttctatcctttttatgaaacttttttgccatttctctttttctcattccacctttctagatttacaatcaaaatggagaaagttgccgccacaatacaaaccagcaaaagggtctttttagatttcaaatttttcaaaaaacacgcctcctaaacttggttaaggctcttctgaaggcactttcgattcgattctaactcgtgctcctgaagcaagcctgttcaagatacatacaagatttaataaacctgatatgaatcaagataagatatgttcatatcaatatattgaacaagattcaagatgtttatgtttcacctttcgtcgatcttgataactctctcctcgtcttctctgaatgaatcgggcttccttaaagactcggttattcttttactgcaagcatcatgtgttttagtggtacatggaatgttcttggtagtatcttctgatgagtctcttctcttttcggagacaagtggttgttgcttccctagaatagaagacgcctttcttgagcttggattatttttagaactatccggttttgagtctccattctctgctacacccatttggttggatgccctgaaaaaactcacatgagatgtgtcctcaagaattcacagagactaagtatactactcaaatcaagaacctttccaatcacatattatgaccctaacaaaccaaagatagcttgttgtaattttagtgggaaactaaaggcagagactttttttttaagctgtgattttggcacaagaacacaagaactgtcttaacatcaaaacataacacaacatccaacaatcactagcaggagtgtttttcagaaatgtacctgtcaccattgtaggatgaagaacgcttaagagaagcgttactatccgctgcatccttcttctgtagcttagtctccactaagctcccactaaaatactctttctcctccatcctcaggcccattagactcggagtttccgacaaacggtcaagatctcccatcataaacgacgaggagaaaaaaggagacggaaacttcgagtgtccaaatttcggtttgtaagtaggtacaaggccgaaattgttatccttgactgatattgaaccacaagatatcaactgcatcagcatattcgaggccctaagcctcggaatagcgggcattcgaacatcttcttgttcaagaatcctaaaactattcatcttactaacatcagctcttattagagactccaaagtatcagtctttcctcctagcgaagaagcactattggaaaaaggcggcgagacagagtttcttgatatttccgcactctccctctccttccccgcacacgaagcctcactcacgaggttattctcgctggtttcaggctctgatgacacatcttcatcagttgatacacctctactaaaagtctctataggtgttttagaacgaccactcacagtttcatcggtttgagtagaagcatctgcgagtccctcgctcttatacactttgtactcagccaaacaccaggaagatgagttcttagcgtctcgagaatcaggagatacaccggaagatgaaacagagcgaagagctggaggagaaagctcatcatcttcatgagaatgcttattagttcctttaccattattcatactcgaagatgaagacgaatcatccatacttctagatgatggtggctccacaactatctgcttcatgttttgagtagctaaattcacaattgggctaaagtgatctgtgcacaacaacataggttttcttaaggcttcttcattgaaacaaaagattaacaaaaaaatgtttgcttttttcacctgaattggattcatcaaatagctcagaacctttaagaacatactcattcccattagctggtaaaatcaaatcatcttctgataaatcatgccaaacaaaaccattcctatagcttctgcagagttaaatcagcagaacattgaatctaaagctacaaaagaagtgataaatgaaatcaagacagttatatagatacctcttactagaccaagaatacattgaagccattcctctacctctaagaacattaagcctctctataacatctgcaaaaacataattgaattcttcataattcttcaaaatctcacaaacctttgaagtatataataacattacctcttaggtataaaccatttggagaagaaatcaacacttccatgaaatgaggatgctcaagttgacgattcttggagaggtaataaacaatttgaactttcttgatcttttgatgatactttggtgatttctcagtccagacttttgctctctctggactcacttctctgctatacttcttcatcctcgcttccatgtttttatctcggcgacctaattggctaattccgacattgttctctgccagatctatcactctggaggaacaagaaaacagagaattaagaaatgaaacgatggtagagttagagagaatctaacagagctcaaggatgaagaagagagatagagactagagagagagagagtttcagcaattaatgaatttttttagagcagtggagattaatggagagacagagagacgacagtaacagtgttaagagagagagagttaaagctttatttttcagacagagctattttgttttgtaacgagggaaaaaaacactgaaaatcactgtgattttattcgctcgtgtctttttcttttttgtctatttttaatttaatcaaattaaagaaaattccacaaatacgtttttacaggtttactggataaataattaaaggatttttttcgccatgaaaatattggattttgttcattcacaaatcaaaaatatttcaatgtttatacataacaatgaaaggtaataaagcattctcaaaaaaaaaaaaaaaaaggtaataaagcattctcgaatgctataaaatactaggataggtcgacattagatccataaaaatttggagataaaagttagatagtatcttggtacaaatgagttcatggttaatcgagaattcgtccataaaaaaattgaaatgataatctcgataaaaaaaatatggtaacgttgaagacgattccaaaaacgagaagttctacacgaagtaacaaaatagcaaggatggtaagttggtaacttgtgactaaatagcaaaatagcaagcaaggttctctccatataggagaaatgaggaaataaataaattttccacaaaagaggaagattcaaatcatggtttctaaatattcaattaaatttggaagactcgcatagttggatatattttgttttgagacactaatcattggattgggatctctcatatgagaatcataccttcttgtggaagagtgatccaaacccaaaatctattgttgatttagaggtgtttgaagtcggtagatatggttgtcgcttatgtgagaaatactttgaaagaaattttggtaaccactgtcacaacaccatgatttggactcagaaacactagaccgtatacctttagaaatatgaaatcataaaatatagccatatataaatctaacaataggattctcagagaataaccgcaaaggcatagcaaaaaggatgattcccatttcaagtggtgtctacgaccacatttatggaggtaacctaagctgtaaaaaattaccaatcatacctattaatatgaaatttaatcagtagtcttaagaagataattttattttattttttgtgctaaagaagaagatgaactttaaacccggaagaagaaggcatttatcttcaaccaatatatatgcccattatgaccacgttcaagtaacaaatacagtaatcaatatgccaattaagaccactctgaggtaataatctcccttccgaatatatggatagatgtttaagagaaatttcaattttgcatcttctttgaggaacggataaacaatttgattaaatgagagcattaacttgcaatttaagaaaagcttaaagcgattatttgctttttctttctttgttggaaagctgaaatggaataaaaactcgtgcatgaagatgtctcttgttagatttacgtgcatgcttttatttctttatcatagcccgtaatagtataatacaaccatatcaaaaccatttatgcatgtaaatatgtaataattgacttggaattcgtggcgatgtagcaataaacttcttctttttattttatgccaattaacttctgttaatgtttttcccatcagcatacttattttccgattttattttttttcgactttctactatgtctaccaaatttctaccaacattctctgcaaaaaaaaattgttgactataacatctttcgccttacaaaaactgatgtgtaagagtttataattaagttacttttagaaaaaataaaattatatatatgcttgagctgctcaagttgagcagtgcatatgtcttgatagatgaaagaggtttaagttagaaagccataccagtcttcaacgtttaatcggaaactgatattttagaatgataatgcatcatgtaaactatacaaacatgtgtatcccaaaagtatataaagatttacaaatatgcaggaagcagtcatttaagccaactcttgatgtatagtcataaacatagatctatttgagccaagccaacaactttttcttccatttatttttatcacatccagcaacaatcttggattaccttctcaacataattagaaccattcttttggactatcactttaacttacataaccaattgaaaccatacacttgaccaatgtgactttggcgcttctgttccttttaagtttgttattgacattgtttctttcacacatattccttgccttgcctttgtgtcttgcaaattttgcagaagcccattcctgtcctttgaaacccaattttattagtgggccttactaaatatatatttgaaacgtccgtcctttaaaaaggcacataattttagtgtatttagggtgtgacagtgacaatttcagcggaattaacaagaacaattaggaaaaaaaacatatgcacttttaagaaaattattatttttattttttcagttttgtagagggaagttttctcaacttttttgcttttccatgtaaagggccagagtaattgagaggaaaactctttttcttgattggtgtaattgtagaagaaaaataattccacttttttattctattaatatcttaatgataaataaaaccctaagtatcttgtgatttattgaaaaccttcaactaaattattaacagcaaaacttttcaagtaaaagatttaacaaaaaattcttagagtactattccgttcatttaaaatcctcaattaaattattaatcaaaaaaatccttaaacaccgaagaagttaaaagaagattaaaatatgagatctgaagtatggtgataaatgaatctcacacaattgaaaactgaaaataaaaataaaaataaaaacaatctaaaaattattattcgctgatcctggtaattaaacttttgacacgtgtcagaactttagtaagagggtttaaagtttatataatataagatatgaggtttagtttaggaaaataattacacacacatatatatatatatatatatattctaatattttatctagaaaatttattgtatcattcccaattttggcccactagtaaccactcaatatgaagctgacccaaccttacccaacttcttcatcatatcatatgaagattttgatatgtttgttgtcaaaataatgatgggaaacttcatgtcgtttaggttcatataaacaaaattacgtatcaaactacgtttatttcattgaaagagcaccaaagttttctcctcctagacgctataacttagcattgctcctaaataggttatgtaattgccttgaatgtcaagagtaagcaaaagtaatcaacttgtatttggaaagtaagatattagtgggtgagttagtcaaatgatagtgcacaaaagtaaagccaagaaaaaagggtcctcaactcctcatactttttctataggatccacttttggcaagaactcattgttactgtcgctgaaaaagttgtcttcttcgaggagactaattcagatctgtgggtaaccaaatcccaatcactgtatgctcatcaacctcacaccatttcatatcttaaagtctcttttccaccttttttttttatacacacatacaaaaggcagtagagtcaatacggtggccgagccagctcactttagtctagctcgctttagccctgatttttgctagtggtgagacgctaactcgcggttaacctatacaatcacatatttaccaagcttataatcaaaaagagtcatgctcacccaaaaaccggatactcggtactacatctttttttgtttaacatgatggacctagactccaagataagaaatgggttaacccacgggcttgacatacaatgacccttggaaagaatacaaagaaaagcgatacatacttgatgcttaagtgaaatgtaagtccataaacgatcaaggcaagagcctttggtacttggtctctcttttggaatcacagtgaaccctcttcctgtttagattattcccacaactatcttgtgacaatggtgatccttcagcaataatcaccggtggaatttcaaaggactcaagttgtggtggcgggtgacgccattgtggaagctgtccagctagaagtagagtctgaagcaaaggccctgccttcaccaccgcctttaaaagcttccctttctccggtaaagtcatctccggaaaatctaactcaatttccaccggcggttcaaaagatgagacaatgctttcttcaccatccgatgagtgaaacccattgatgtttggatcttgctcttcgtccgtttggtgttgaaggaggaagttttggtcaagaagaatccttttgtatctctcttgtgcttcatctttctctttgatagctttgttgagaagatctttgagctgcattatctggtcgtctttggcaatgagttcttcgctggccaccattcttgtttgctctaactccattgttgtgtgaagaagagaatgtctaagctcttctattgtctgccaaccaaaataaacagtttgagtttggaggatttgagcaatcgataataaaaagaaagtagattggtgatttagttacctttataccacactggttttggtgactccaactaagtagataattttgctgctgtctctccatcttcctcaatggatcaattctaaatagggtgagaaagagagagagtgagttatatatgacttatgatagtgtattagtgggtaattatgggtaatttgatttgcttttagattggtcacaaggggttgggacaagactcaagaaaatgtctgaaacctttttccatcaaagagaatctttattgacctttttcttcctttttatttatttgttttataacaaaatacaaattaaacaaacaaacaaaaaaagaacgcgttaacggtaattatgattatattggaaaaatcctttattccatggacttattcgacctcgattctagaattagacgttgaatatgttatatgatgagaacgtatcaactttattctaaactagtaaatatatatgtcatgctcatgcgagaagatattgcgagtatccagattagtaaacttgcatctttttggacatacttaatagggcatatttgttagacttagacaaaaacatttttggtaaaaattgacaaaaaaaagtcatggaaacattatatctcaccgaatactatgtttactaatctgtttcgtttgtaaacgagcataacattcatcttgtatagacaaaatgaaaatggggacatttatggttttactattttttggaagaattggatattctttctctagtagaataatttcttaaaatatttgtcgtcctacataatttatgaacatatatcaaaattagtatgagttatgggccaccttaccttttccttacagtcgttggcagtaagagagaatataataagtgccaatggaaatgggaccctaagaaaattcgaaaaaggagataaaattaaaaatagctttcacgtcgatgaatttattattactacattccgaaacaaattatctagagctgagtcgatcacacatgtccacacgcgtacgtgaattttcctctgcgtatgtgaattcacacgtacttgtgtttttatactcgtatcataagtatggaaagttttgaaagacaatgtgtgtatgatgtgaacgtgagtagagaaaaattggtcagcaaaaggagggaactgataacctaacatctacccttttgtttctattcacaggtctcaaataatatatattttttattacttaaatacaatatttgttgaattttatatatttttaatttaaaccaaattgaaaatgagtgggcatattttattttaggtctccataaatttgtgatatataggatctctgacattttaaaaacagttcttctgactaatctcgagttaaagcttaatcaaagatcaacagtatatcttatttgggtcaacttacatcaattaatatataacatggatgatatgatgatatattgatgagagtatagcaaaaaatactttcctattatttttcattttcttattctcatcagtttgttactacttattccttagtattactaatacttcccaaaggtttacaaaaacattttttatttagtaggttcattaagagcttaattacccttgtttctagtaagttgcaaaaagtatatttacatatacacatataatattagaaaagtttatgttatgttagatttagttataacaatttattttatttttttgttatattttatttagaattctgtatataataatcatagattatttgttaattaaaaagatcacatcaagataaaatagtcatagtcctaattcgtacagaactccactagagttaatctacagtttccttgtagaagtttttcaacggtaaaacatgcagcttcattaggatctatgattattttatatctttctcatcttctctttgtatcctttcttaaacctgtattccagtatacaccatagctgaggtaaggtcagtacttgcagtgatgttacatttatggaacgaaaatcccgataaataaatctctttatcaattttgttgcctcgatttggtaatattgaaacattgttgttgctgccgtgtttcaaaatactaatgaacatgaaaattattttttgttccaatcaatgattagtataattttgtagataaaaaaagtgataataatcgttttatatatcttgtatttcattttctttggattcttaaaactaatattatttgaactaaacttacaagatgtattgtattaacaaaatactataagggaagatgaaaactcacgtgaaacttgaaaactggtattacaattttttaccaaagattttttttatttaaaaaaaaataagaaattgaaattctagacatgtcaaaaggaaagttatgatatgccgctcagattatctcatctatctatcatagacacacataaatactttgccaaaaaaaaaagcacacataaatatacatttccttatgttttgcttatattttacatttgttttgctcatttttataatttacttttctatatcaaaataaaataaaaagatgttaaataaatccaacattatgttatatctaggtatctttataattctgacaatcatcaattccatctactttggtcaatggttataacattaagtttttttctatcatcatgtttggatccattatactaaagattttccttaggaatataactaaaattgttgtcaaataaatgaaagatcgaggagtttgaagaatagagctcagcacgtgtttatatatagttctcgattataataatgttccttatcttctgtgattatcttaatagtaattaatatttttttttaaacaactatctaaatttagtaaattctatagatattattttttctaaattatttttaagttaaattgattatatttatcatcgaatatatattagttaattatatattttattatgttaaattgtatctaccacaatcttcttttagtattttttaaaaaggtcccttacatttaagctaaatatagtacaatatctaagaaacataaagtctactaatgttatgaaaaacctttttccatgtataaaattctaaaatcacgattaatatctagtaataatcaagaacataattttatgtttaagtacttttaaataaaacagaaaatttatactattaaattcatcatacataaattgtattaattattataattgtaaaattatcaatatcatgataaatgttttatattaacagtttagtttcaaatgacaattttcagggagcaattcttaatattaagaattaattctatcaagataactatgatttttatattatacaatttatcaatgtcgaatttatttcattgatattcttagttattacacatacacgaagtaataatcatagatatttatcttctcattgattcatgtgcttttatattcattttgttaacaaagattttgtattgattgttaatgctaagatacaggtatttttaatgtgcatctagtattttatttaattaaaacaaaatttgttgttgtataatttaaattttactaatagaacacataatgttatagtttgtgcaagtttctttgttacgtcactatgaattttgcgagaataaaataggggttaagacataaattttgttttaatggatttatagtagtaaaaatacttctataaagacatttatattagcgaaattttaatcagcaaaccaaactactgctgaagtttcagttgtactccttcaattgctgctgcaaccttgaagaagataggcggctctggttcgaacctgttgacgaccacgaaccaaaaccgtttagtcagatgaactcagtaattaaaaacatgaatcgaagttaaaagagaataaaaggtttagatttgatatgctttttactcacttttgatgcataagaccgaagatcggtgctgttgatctgacaagaacagtttctgagaaacacagcccacatgtccctcagtacaggctttgcttctaccaatgtactagagaagagccagttctcagccaataccaggaaaatgtacattttgaaaaggttacaacttctctccttcacattgatagacatcagcgagctcagcaaattttcgtcgctgtcctgttaataatagataatcaataacagagaatgtataaatgccatgtttgctacaaacttaacttgttggtattatcttataatttagttcatggttggttaccttatgatcaagtaaaacaacaagcatttgatgtgcaatggaacttctcagatgcttgcttcgagcatcaacacctgatacagattccactaccctcaaacaatttatgtcttgaggtactctgcagatgcatcaaaccagaaagacaaactacgtaagtcaattaacagataagacaaaacagtccaaggttgctacaataacatacgaggtcgaacctggaagcaagagagttagctattttcttgcagcttgaaatccattcttcctctttgaaggatccaataacagatattaagcactcttgtaagagaattgaaagaccgagaagactgcgatctaagagcaacgatacaaggatttcggctatctgttcaacttgtgaagtggtaaaaataggttttttacacctgaatcatgaagcaacagagaaggtaggagttatcaaaatgtatgaagtagcactgaaaaggcagaagaatgttattgataatctgtaaaagagagtttttgcgccacaaacctaaattgacaacaagttgtaaccaatgttaaccaagctctaatattctgtggaggaccttgacactcagaatcttcaaagccaaaagttagcggactccagtagtattataaaacctaaagaaaaaataaccgccaattaaagaacagggagaaacaggacaactacccgcttctgctagttcaacgtcttgtgagtgtgacagactaattctgaacccatatgattcaagagcttctttaagttcctgatagttaggaagccagtaaatctcaacagaagctccattaacctgatttaaaaccaaggagtcagcttcaatcaaaacataatgtaataatctcaggaaagaaagaaagtacacagacgaaccttgttttgtgataacagtatggaacaccaaaagtcacaagcagatgatcttagatcttctttagatgaatacaacactagtaagtcccaaacatcaaaaccataatgtaagccaaaggactccatagaataaacaaagttaaagagagagctagaacacatacatatattaagcgtccacttgcaaatgaacttttccacacgtccacaagtcatgatcagtcttgtgagccagccgttaaccagcaagccttcaataaaagttgttcctggattgtacaggaaacctattactttaaaagccagagagactgactttaaaaaccgatcaaaaggcgatgaggtcatagaaaacaaaccttcatcaacggtaagacccaccaccaaatttaactgattattcataaactctttcaacaagcagcaactatcgagatcaacaagcagtgaaggtattggagttttctgtatagtaacattaacaaagtacaaatttttacaactatcacttactctaaaacaacattaaaacatgggagaaataatcagcctaacctgatctccaaacatagataatccccactcttgattctcctcttcatcagctatctcattcatctaataacacaacaatcaccaccaaacattacacatacagaatgtaagatgataaacataaaaagagatgatattttttactcatacctgattctgacactcaacaacacattgagaaagcttatctacttgaccttgttcatcatcatccgaatgataaaccttagacactttgcgtttcttgtttaccttgtctataaccttactcttctctttgtaaaaatcagagagaagatcgtccaaaccaataactttcttcctgtttaatgacattttacaaaaatttaatcttcgtgtcaaaatcagaaattgataaaggaacaaacttttcatcaaccctaaacaaaagaacccaaatttcagaattcaacaaggaaccctaatttacaaaagttcggaatttcattacaatgacaacaattcagagaaatcggacactacataagtcggaaaatgggtaattagggattcgaatgttgctatagataaaataaaggattcaccttttttcaattatcgttggagggttaacgagaggatcttcgttctcgaaatcaagaggtccatccaaatccatcgttgagttctctctaacttggggctgattcaagctccttctccttcagacgaaacccttaaaaagttgaaacttttgcagctttgggaagcgcgaataagggcaagtgtttaaaagagccaacacttcagtttctagagaacccgtacttttgagttttgagtcaaaacactagttttaaaagaaaattctcaacaaaaaaaactcaactatttaaattttttgggttgttaaaaaaatttagattcatttattagtgacaaataaaattcgaactataaaatattggcagatttatacacacaatttcaaacaaaaaaaaaactttagaaaaaaacttaattctatttgtttgaaacaatgaatcttttggagatgtagaagttctataatctattatttagtttatggaagccaactttatgaaactagtaatgtgttgactacaaaaccagagatgttgggggtaagttaagcttataaaaaaaaagttttaaaactgctctaaagaagaaaatataaacacgtatttgaatcaccccaaatttagatgttgtatctgcctatcagcccatgcatgtgcgatcatgagaaagaaaaataaacaaaactttcttttgcaagtgaatttatttttctaaactctacctgcaaaatttgtccaatgtgaatataaatcccaaaacggttaacaaacatacacttgaaccggagtctccttttcacagcctaagacacaattgtgacaatttttctcgtaagaggaatgtgtcgtaactaattttaactctatgacttgaacgtccaaagagctcgtgctgaaaagggcaaataggtaaatcacaactaatcggcgtgcgttatccacagttggtaagaatgagacggacacgagtgctatatgacagctctacgatgtaacattacaactcgtgaacgtgatgttttggaatgttatgagattatcagtttatcacatgattactattacccttttttagtattttagattgaccgacaaaagaaatgcttcaacaacttgtcctgaattaaagaaaagtaaaccaagttgagaaagactaaagaaattaaacggctcttttctattaatttattcaactatgattcaagtaacaaaaacaatttgtgtgataattatttaccaacaaattcaacagcttttcttgaatcaggaactaattcagactcggactcaggactctccctaaacttcttgtaaatatcacctttgtaaaactctctcgtccttatcgctagccccaaagatacaagtgctccaaaaaacgttactgctgccaaaatcagaaacggcagcttataacattgacttcctaagcaagtcaagtcctttacgtcttttcgggttagccctcgagccgttagttgcttcaaggcctctttatcgtaaagcattcccgtgacacgaacgttcaggatgtaagacccgagcgggctagcaagttgtccacaattgaacaatgtagagtagtacttgagtccaaaaagttctgagatgatggcaaagagcagaggaagttgtgcaccgaaagagaatcccattagaattgacgctatatataccgagcctggtaccgggaacgcgatgagaaggtggccagcacaactcaataagaggactaatgtcatcataagcggccggggtaatttatactttgcaagtaagtattccgagacaaagccagagaacactcgaccgaagtagttccatatgctgactagagacacaaaggaactaaccgtgtggttcgggtagccgagggattctcctatctgcccgaggttgtctacggcagtcaagctcgatcctaaaccacagaatgtcgcgacaaataggattatcatgtcggtgcttaacaatgcttgtaatattgtgtaatcttcccctcttggcggtggagaaaacaccgtcgagaaacaagattttgtctccttctcttctccattcaccttggcggctttgtcctgatcaagatcaagttctttctttggtttctcaaccttgacctcgcttggctcttcgataggtaacttcatcatgttccaaacttcaagctcttgcttaacggaaaccgtaagaggcacaaaaagcaaagcacaacatatcgtagcgctagccgcataagcggcttttgagaaatgaacttgcttctcagcaatgttcattgccataaggaacaaagccaagaatatagaaatataaaggaattggtaaaacacactaagctcattcctctgcctcacaaccttcttctctcttatcaaatacacaaacacaagagaaaccgcagcaggcaaccatgctatcaacaagatcaaagacttggaatcgtgtccatagatcgcaaaataaagctgcgtgaagattgcaccacttagtccaacataacccttaagcaaaccaagcataactcctctgctctcagggaaattcttaacacaagtaaccaaagctcctgtgtttgcaaagttctgcgagttggctcctatacaaatataaagacacatttgccaaacctttggcttagcgactttgccggttacggtaagccagatcataaagtaaccgacgaagttcatcgccgagccaatggtgaggacgaaccaagtcggtgtgacctcagctattagaccggacaagacaccaacgtttgctccaagatctttaaagaaacctaagaggttcaacgtggtctgatcgtaaccaagtgtagatttgatatctttagagtaagtaccaaaaaggtaggtggctccagcgcaagccatgatgagaaacgaagcaaacaccatgaaccatcttccattgaagaagtgaatcaagaatcgtacggtctcgtcgtttcccatctttgaaaccagagtttgaggctattatcaagatatctttgaaagtgaatcttgaaaagatttgagtatttcaagattttcttgattgagaaatggagaaacttggctgatccagaataagagaatgagagagctagataaatgattagagtacagaaagagagtctcagggctataaagtagatcagaggaataggggaatttgtttatatgtaattgtaaagtatggaacaaagagctgattgtcggaaagttttgagggagatttgaccattttatcgtagctcagaaaagataaagattgaccattttatctgtcttttctaattttgtctttttgtttgattactgtccaaagataaagagatattatcttcctaatgaagtgtccacctaagagtgccaaaaattcagtgtgtccatctaagcttaactatctccatatagaatgtccaacaaaacaaaactagacatttttacactaaactagaataaaatgtttacttaattatatgtctatcttttttgtttttacgttgactagatagttgtaatgttagtaactaataatcattttatacaattgtcaatcgcaaatgcatgcatatttaacattgatcctatatgtttcagattttattttttctatgtgtgattcagtaacaaatccactaggacaaatctcatacaagttgccaaaaaaaaaacagacaaatgttatacaatatgaagcaaacatgtggaaattcagaaaaccttatatataggatgtttttctaagactttttaacgctcgaattaataaaacaaattaggagactttgccggaataaaaaagaatcgaaaaacatggaagagtgactattgaacgtcggcctaataggaaaacgcggtccatgaacttttgatgcacaaaaatgttcgaaagctaagatcctctcttctaggaaaaagagagaatgcataagatttatttgacttagtttatatacatatgattatctaattaattttgaaaaataataaatacgtaagattcatttctccaatttgttatgttttcccttttgtttttctaatatttttagttatatattttacaaatttataaatgttgttcttttatctaaaataaacaatactaaatgattttcgaatctaaccgtactggaaaacgtcgttcattaaactggaagagtgtcgaaatgtatgattatggtgttgcgcacatgtcttatgttagtgagtggatatcatcataatttagcaattgtttgtgtaatttctaaaccattatattaatatgcatatcatggtctatacttcgtgtagctaattatcgttcggtgttataatatttttttttgaaaaagaaagagagcaaaaaaagcaaaccttacaaaattagataccctaaattttctgttcaaggaaggcctaaaccaatatttcaaattgtttaactgcacaatgggcctcaatgtcgaacgttcgttttagcgtttataaaaaaaaataaaaaaggatacaacctatggaatcatttcaacgatacaaaacaaacccaaacgtattagattaatcgctaaccacccatttttatgttatgacttatgacattatcatcttattggttatgtattatgtcattccaacttaaccaagcaacctcttgaaagtgactttataccttatattatctggtttgttgtatatataatacacgtaatatgcgattggacaataatgctaaaactaaaccataagcacatacataatctatatatatgcggtcggtttgcaaaagattaatagtcttacctcttctttttgcataaacaaaaggtgtagaaatggagtggttaattggtaaagttgccttttcttataagttctaattaaatacctaagtattaaataaaagtaacaaataaagggattacataaaagctaacaaataaaaaattaagtattaaataaagggaaatttactagagtaacccatattttatacataattacctaaaaggaatgctaaaaatatgagttatttgagtaataattatacctaaattatccttgttttcttttgcagagaaaaacaatattacagaaatgccattactatttaattccagcaaggcaataaaaccacatttatttacgaaaatgccatcgtcgtttttggtaaatctgtggctcttgttgcgacggatttgttatcgatcacagatttgttggtcaaccacagattttttacaacagacttgtcttgtaccacagactttactgtgttatgttacgccagattttttttttccgcagattttttaaccgtgactgatttgtttcatatagtctccacagattttatttaaatttcaaaagtaagaatgttgaaaccaaatatgtcactgatttgttttccggaccacagatttttctttatggtggcaacagattttctatttgcacccaaaaatctgttgtgttacaacatatttgttaacctcgaaaaatgttatataggcatgacagagttgttttgtgtaatcacagatttaattaacttgttaacaaatctggtgttttacaacagatttttgttataaaaaaaaattactacacagtcacatagtgataacagatttgtttttagtgatgacagttttgtttttcagtgtcaaagcataacagatttactcatgtcaatgttatggccgatttgtttatgactagaataacctttttagtaataacagactttttttggcagatttatttttaaaatttcgaaattttttgttatatgagatttattagctagccctcaattaaattatttcccggtctgattgtatgttaaatccggtttgactggattttttttatttattttgaaaacgttacgacagacttttattagctaacagatttttccgaaatattaccatatttgagttaaggaatattctcgtaacgcgtagggttttcttacggcagatttgtttatgttatttccatatttgatgtttaatgcattaaattgacaataaagtgtatatctttctaaaatcaaattttttggtttttttccttattctacacatatcaactatttcaataagatcttttgattgcgtttccttttatcaatttatatttttaatttatatttttaatataatcttaatttatattttttcaatttatattcttaatttatattttttcatatcaataagatccagttttttttgggatcttattcatttatatttttaatttatttgattcataattcgttttttttttgctaaaaatatggtataaggttgattaaggttaattggtctttttacttaaaattggagtcattttagttaatcattgccaagaggagtcattctagttatttttgttaaaattagagtcaatctgagcaaatttcagttaaataaaactcgttttgggagaaggatttgggagaaggatttctagctccaaaagcgtacttttatgagttgagaatgtacataacaagaatacgttaaaattgttgaacacttgtatgttgtttctagaaatttctgatcaggtaagggactcgtaatggtacagtcgtgaaaatatttataaattgttacatatctacataaccttacaaataactaaactagaagagggtttatgtatatttattcattcgaaaagggaatacttttttgaaaagggatacataattatagtggaaaccctgatattacttaattaggggattgtatatattcttgatgattacgggaacggagaggtggttcaacatcaatttgatttcttctttttcgtcgaaatttttggtttttattgtttctagcaacattttacagtacttttttttactgaaatgaatatctaaaagtcttttgaaagttcatcacaacgatgtatgttcttagaccattcttattgatgagtttttagtagtatttttaacattttggatagacaaaataatacttaaatattaaatggttcttaataagaagagaaagtgtatcaacaatatcttatttaagagtcaattttacttttctaagaacctttttctattttttttttgtattttattttatataatattttaaaagtttttttaaaatttttaagaacctattgataatgatgctcttaggcttctacatatttgctagtgccacctaatattcttatctggcttgattagatcgaaaatgtcaatctatagaactattatagaagccaaagaaagttggttgacgagtcgttttctaagtgtatacaaaactattttcttcaaatctcttgtatcattaaatagtaacgttttaaatattttctggataagcataagtttctttgaaaactattttgtatatattcctacttctccatttttctaaattattttatattatacatagttttccaaattatcaaacatttttacatgttttgactaataaataaacatattactgcgaattaattaaaaataaatattccacacaataattaccttacaagcgaataaacttttactatgttttcgatgtaaatttttcttacatatttgtaactgaaatttctaacttgttgtttcataagttttaaaatttattatctaattatctacttttatgtgttctagagcaaagtgctaaatgtatatatacttagatgttgtgttgtaatccaatgtcaatataatcaatgatttagctatttgtaaacatactaaatagtattccaccaaaaaaaaaacatactaaacagtaaacaaacagcaaaaacaaaatccacatgtcctaaaagatagtctgattttcgttcataatgctctggtttttgaaagataataattgtgttgtatgagtgtatgacaaatattcattggtttgagaagttaacaaaatttggtggctacaaatggtttcctattcgagttgggtccattatcccttggcgtgtacggaaataatacctacccatcataatctgatcaaagatgaggtagtctttaaataaattttgcggcttatatcaatctttatgtactataaactgtgaactttttgttcttcaggacttccacatcattgcccaatccggttataccttcgctagttaatatgttaattaacattaaattaaagagctaacatttcttaggtagtaaaatagaagttttgaactactatactactaacatgtgaaaatactttagtcacaaatatgacaatatacaaatttattggaatgcaaattcttgaatttcaattgtttgaaaattatatatttctacataacaattctttataaactaaaaatattaattttccatggctatgcgttatacgtatatgtcaaatatttttattatttatataattttacgataaattagtactccactttactatattactcaacactaaaagacctctttaactccgcctaacatagatatgttttcttttgaatgtttcggttaaacatgacagagatttgttttcttgctttcgctcaatacatatttgtgctcctttagaaaagtagtatttcctaacaatccaacattttcatatttattatatcttttaaatattatcatggttctttttctttcgtcatgtttggcctctttaaaataattcttgaattgtatgagcattaatccaataacgtcctgatcccaaaaacctcatattaggtttgagagtccgaaaatatacttttcacataaagcacctaaggtgtcatactttaacaacttcacaaaatatgcaaaatttgtcattgtcactttgagatgtaagtttttttttacatgcaaatagattgagtctctttacgtgtaaattcatttaataaaattgtatggaatatctatttatatcatatatttctaacatatatataaatatctatacaaaaatacgactttttggcacatgtaattagaaaaatccacaagaaacagaaaaaagaaacaccaaatacaacgaaatgaagaaattattataaatttgaatggcttaacatctcttaagagtcaacaaggtaaaggattaattagtagtcttcatcaatctttctccaccttcttctattccttaatctccactttatctcccaaacccgaaaactcctcttcaccaacttaaaccctattaactaatcccaacaatcagatgtttcgaattcaacaaccagctcaggccataagattcatcccggagaaacaagaacgatgacaacacataaacatagaagaacagagaaaaatctctgttttaagcaatactacaaatggatcctctgttttatcctcactctctatttttttgcttccttctttgtcgaccatgatcaagatcatagatcttctacttccatatcaaagcatcttcttactaaccataaacctaagcttttcgcttctcgtgccatgtttgaatctaaaatccatgatcacaaacttgggtttacctctcaacaacctaacatcaaaacaggtacatattacatatatatagatgaatcatgaatccatcatgttttctagtagaattttttttcataacaatatttttggttgttttaattttctttagacgtattcaacaatttgaaaatctacgtctatgacttaccttcaaagttcaacaaagactggttagccaatgatagatgcaccaaccacctctttgccgcggaagtggctctccataaggcgtttctcagcctcgaaggagatgtaaggacggaagatccgtatgaagccgatttcttctttgtccctgtctatgtctcttgcaacttcagcaccattaatggctttccagcgattggccatgcacgatcactcatcaatgacgcgataaagctcgtctcgactcaataccctttttggaaccgaaccagtggctctgatcatgtcttcacggccacacacgactttggctcttgcttccacaccatggttagtttaaaaatgatttgccaaatatatatgtttatttatactcaaaatttatatttctttttggttgtgaaggaggatagagctattgctgatggagtaccaatttttttgagaaactctataattttgcaaacatttggtgttacttttaaccatccatgccaagaggtagagaacgtggtgataccaccgtacatctcaccggaaagtttacacaagactcaaaagaatattccggtaactaaagaacgagacatttgggtttttttccgtggcaagatggaacttcatcccaaaaacatcagtggacgcttctatagcaagtaacaaaactcttatagcaatctctatacctagttttttttcttctataaaatgcataaaactttaaatattgaactactttttttaacctatcaggcgtgtaaggacgaatatatggcggagttacggtggtgaccggaggttttatctccaacggcaaagatttgccggttaccagtcagaaatagctcgttctgttttctgtttatgtcctctcgggtgggcaccgtggagcccaagacttgttgaatcggtggctcttggctgtgttccggtgattatagccgacgggattcgtttgccgttcccttccaccgtacgttggccggatatttcgctcacggtggcggagagagacgttggaaagctaggggatattttggaacacgtggcggctactaatttgtcagtcatacagagaaacttggaggatccgtctgttaggcgggcccttatgtttaatgttccttcaagagagggagatgccacgtggcaagttttggaggctttgtcaaagaaattgaataggtctgttagaaggtcaaactctttcttgtaaaccaatataattttgacacctgtgtattactattttttttcctggctagtgagatataagagtagtaagctcttaaatgtgaaagatatgaaccttcaagatttgttgttaggaatttcaccaaatgaactttaggtgagacttaattaaacttttccacatccactattaagtcattttctaacaaccaaattagaacataatccaaggaggaacttagcctaagtagagaatattttggacaaaatgaagtgtaagaaaagatatcaaacaacttgtgatagtagcattttatatgtgtactccaacattaggaactgtgatttgttgtagaaaaattccctaaagaagcattctttgtgcaaatctgtctcaaggttacaattgcaggctgaactcctgatcgtagaggaacaactgaagcgactctcatgtgttgcgcgtttcggttttgaggccgagttaacgtcatcctaagcatttctccatcaaagacctgattcaccattgatgctgcaattgaaaacaaaacatctaagaggaatcatctcaaacttactcagagcttttatagtacagcgatttgatgatatttaccggctaatggattgagcttagtgaagtggaagaactcatcagctgaacaaccaaagagaacagttgcagctctatcaaagcatatcacagttttcactgatgcatctgttgctattgacatctgttagctccaaaaaaggtggaaactttgaagttacacaattactcaattccacaagacattaacagattcaccaaaactcattcttgtctatgcatagaactaaattggacaaagtccatttctaacactatagacatctgttaggttcagaaaggtgagaactttgaagttatataattactcaattccacagttcttacaagagattaacagattcaccaaaactgattctctacaaaggacaaagcccatttctaaataacagctgctaaacctaaaaccctaattcatcacaaaattttcagattattccaccagaaaacaaaaacctagaaggaagaagaagatgaaagggttcttacgagaatccgatagagaagttttggttcttttgatttgcagaatttgcaaaatgaagaagaagcaaagccattgttatctgaaggaagaactctctggcagcgagaacaaactctatagcaataatctgtgaggtcgacggcaagcaacgtgcaaagaaccgtttcagtggcttccatgtctcttaactttagggctttctctgtttttccacaaaagttttctccaatccataagaaattctttaaaacatttgggccgagttacaaaagaagacccaaatcctcaaatttatgtcattgaagaaaaaaagtcatatttcttttaaagcaatagagtaaaagttagagccttaacatacaagaattgatagtgacacatatatgacttgatgcacatagatattctcaagaatacctaacacttatgtgatgaatccttgagagttatttcttacaaatcatgtagttgctgctcttcctttagtgtccttgtgattgttatctttgttgtgtttctactagaacccgaaaacttatccatgtagagtccgaggtacgatataagtgggtcggtcctcgctttgtccaccacaagctttagagaccgcgactcaacaacattcagaaaccgtaaaagccttttgttaccaaccgtcgtgccgctcacaactctctcccactcaccgcttccagtcttccgtgtctcgagatggaaagatgcgatcctttgacccatatggattggttctcgaatctccaacacattgaagctaaccaaatctttaaactctaagtataacacccattcgttttgattctcttctggcgcccagtacttgtctaatccttcttccaaaacattcttaggaccaaactgtgaactttgatcgccacgaatactgctcgagttaacgaatgctttacgggcgagattgttcgagaaaatggagttcttcatttcgctgaactcttcaagaaccttaatgtcttgctcagatatcaatcctgaagaattaggaggtacattaagcaagaagagacagtttcttccaactgagttatagtatatatccaaaagctgaacagccggtttaggcgactccgacgcatgccaaaaccaaccgggtcgaatcgatacatcacattccgctggtacccaatcttgcccatagccatcaccttcttgagaatacctacaagatcaaacaaacaacttcaagctatgatctctatcatccctaacatctatagaaagtttcaacattagagagtgactcacgaaggctcagtgtcaccaatctttgcattggttctgttaaagagtgaccagcaagtagagccagctagaccagcttcatcaccaatccacctgacatcaggaccagcgtcagagaatataacagctttaggctgaagctgatggatcaaactaaaccaagtatcaaagaaatattccatatctttctctccgtctcctttagctccatctaaccaaacttccttaatctctccatacctaataaagattcaacctttttaaaaacttggaactggaatcacaaacccatttgactgatatgagaaaaaggagcttactttgttagtaactcggtcatttgactcagatagaactcgttatactccaatgtcttgccataacactgttcatgtcgatcccatggagaaaggtaaagaccaagtccaattccagcttcctttgccgcagaagctagttcagccactacatcgccggctccgtttctccattggctagatttgacggagtaatcagtgtattcgctaggccagagacagaatccatcatggtgcttagctgtgaggataacgcgggaaaagcctgagtctttagcgatttggacccattgacttgcgttgagatgggtcgggttgaaaatggatgggttagcttttccggtgccccattcggagtcggtgaaagtgttgggtccaaaatggaggaacatggccatggatccgagttgccattggagctgttgggaggatgggaggggtaaaattggacatgggtgtggttttagtagtgatgatgaatttgagatttgggagagggagaggattgagaagaagaagaagaaaagagtgatttgagagttcatgggtcttgaaagattttagtgactttcgttatcttccttgttgttgttcttcttctctaataagttcttcaatggagttttgtcgtctctatccttttcttcttgagctttttagttttttttgctttggttctaactttgacgtgattattcattattggttggaaacttaatgcaaacgcaataaaaatttgtttttagtataactatgtgactaaataacattgaataaatgatgaccaatttttccatttttaatggaattgaaagaaaaatgtctactgtctagtaatgattaaaaagatttattttctcaacatttctcatttttattagtattttcttgcacgacatttttttagtgtaaaccaaattcacacattattaaccaaaacaaaaataggaatctcaaattactaacaattttttttttttaataacctgtttaatagaacttatttcattttttaaaaaaatattgaatatataaatgatcttaatgaaaacaaaaatagaaaaagcaagagtaaggaaaggactataacaaagttgtacgtacactgtgaaccacctccctacactcccttctgttacgcagccgtctctgaaacccattttcgtcgtcttctccacttttcctttgaagaaaccgagacagatactccagtctctattctctatcctccatcaaggttctctctgtctctgctaatgtgtttgtctccttgctttttgagttttttttttttgaggttttttttttaaacctgtatgcagaagaagttagagacgaaaatggagaatccgcaagtgtgtgaatgttaccacggagatgtggaggaggagaagaaaaagaaacagaacaatacgacgtcgccggttcacgtcgttcttaagattgattttcactgtgacggctgtatcgctagaatcgttcgcttatctcgtcgtttagaaggtacaatctccgttcagaaccctagaaatctaaatcgatgaaccatggattcgttatgtttcttaacacaatctcgtttcgcatttatctcgggttcgatttctctgttttgtggattttcatggattcgttgctgaaatctcagtcgaatcatccgtgttaatcgtttgctttgtttcgtttcttctccgataatggtttcgagcatcgtgaaagcgattgagagtttttgttaaaccctaaaccctgacgaagttttgttctcttcctcgtttatttacgtttatcgatcttcttcttagatctagtttcaggatcataaatattctctgtttctgctattgaaaacacagcgattgtaaagaaattagtcaatttttgagtctttgattcatgatttttgttggtatacaagaaattgctatcgatgctcaatggctcattgacttgttctgattgttgtactgtatcaggagttgaaacagtgagagcagatcctgattcgaacaagctgactctgattgggtttatcatggatccagtgaagattgctgagaaacttcagaagaagagcaagaagaaagtggagctgatatctcctaaaccaaagaaagacaccaaagagaacaatgagaaaaaggctaatgataagactcagactgtggtaagctctacattcattgcatacgttctctgattaggacatttgtttctcacaaacacttaaaccatgactagaatgtgataactagtaaggaagtaagtagtatcaaaaggtagattttctcaggcttacttgatcctcaagtaacaatcttcttaactcgtaccattcctttgtagataatgtactatagccgttatcttctaggtgatcatatgggttaataagtactttagtctttcgaaattacttgctatgacattatattctctgttcttcttcttaggttgctgtgaccacagtggtgttgaaagtgaattgctcttgtgatggttgcatcaagagaattcaaaaggctgtctctacgaccaagggtaagaatttttcctgactattactttgtgtatttggtttgactcatacagaacttgtttgcggccattttaatctgtgtctaatggtattgagtatgtgattttgtcaataggagtgtatcaagtcaaaatggacaaagagaaggaaacggtaacagtcatgggaacaatggacatcaagtctgtgacagataatttgaaacgcaagctgaagaaaaccgtccaggtcgtgcctgagaagaagaagaagaagaaagacaaggacaatgcagaggtaaacaccaaagtcgggtctccttgtcaacctggaaatggatgcactcatgggattgggccttacaggttcatggaaggcccaatgactgggtttttcagtgaggaagatcagagctattgcagcgttatgtgagtttcgaggtgacaaagcatttggagtttattacaaatatatatactaggaggtaaataaactaataggaaacagaaaagaaaaaagaagaagaagtaaagtctgaaggatatattgtgatggtctgtgtcacatgagagtagtaaaaaaatacactagtattttctattttgagagatatcagagtacgtttttgtggagaggatccacttttcgacatagtgaatttggaaatagaattttaagctttcatgtttccatgaagaacttaatggttacaacttataaaaaaatatgtttccatgagtcccggcctttaagttcatacgaagcaaagtctttctccaaataagaattgagttcctatatttaaagaacatatatggtccttcgacttgtttactttagtgctaatgcacctcggcttgatgtttacgcctaacgacatgaatctatcttaaaagtttaagaaatatgtattttctttaatggttaaataaatcaccatgttgattataagagaccatgatccgaagtaactattaaacaagaatacttaattattttacatatcctgtggattaaagccgagttggtttggaatcctcggttatatatatacgcacgaaagattatgtacattgttacatatatttgaagggataataacaaacaaaagttttccgcttaagcaaagaaaatatctctcgtttatcgttaaaactgaataaatctccattccaacgttaacttgttgactaagctactttaggtccgacgtttagtcatagaaagtaggatagatagcaccaagaccaagtgtagtgtgtgtaattatcaatagattagatactttcctagatatttttaggatgcaatttgatattgtttataggtcaataacttatttagttagttaacagttttttcttaatcaaaaaaaaatatcctaccaaatttcattcacttgtataaacacgcgggttcatgtatctatagagttgaacaaaaagtgcaaaatccttatatatcgaaaacaagaagacgagaaacaaataaagaccgtgtcggaccagcccccggttatagcgggacttctagtcacgtagctttcaaaatttaatttggactgtgggctgctaacgacattatatgctcttttccccaactttttcaatcatgtaatacaattttaataaacaacgtggagttatttacactaccatatgtctaatcaactagctaggtcacattatgtcaagatggtgttgctatatagtcatcaagtcctaagatattatcaacaagtttcctcattggacgttcaaaagtgtacttttttggataatgactgttctattgcctcatgttcctatgtttaatgccgacttctgtttttatttaaggtaatttgttgtttctgaaaaaaaaatgattattgttggtacgaggtgattagaatgtgtaagtgtgtaaatttgtaagatttttttaaaaatttacaataacttatttttcaatgattgatgtttttccaagatctataatggatgaaataatattcagaagttctgacaaagatttcttatgagatatgtcaaagtaaaatatattaattccagatcaaaattctaaaatatttatgcaaacatcatcactatattgtcttaaggtgatacatgttatgaaaatatttttttaattaaaagcagcataggataattacaaagataataagaacaaaatatatatagacaattgaagaaaactgaaagcatacgtatatgaaattgattcgtatacgttgatcatggttatgtgtattttggttacgtgcattgcttgtagccttggacattggtttctcatcgttatgaaattgaataggagatatggaaaatatcgtacgcggtacgcatgtcatttgtcaaacacatgaatcaaatgcgtcccattcttgattcgaccgacactgtttctatgtaacgtccgtgtattgcattttgatacaataattaagtttagtgtctttaaaatgcatcgtaacaaaataactaacatagactctttttttttttttttttgtcaaggactcagatgcctaaacagctttaagatcaaaactgagtggattagcaaaatatttgtataatacttattatttcttgaaattagttctaagagcatttccattgtgtttaaatttagatatcacccactaaactaatgaaaaaaataaaataggagaagggttcttgtttaagtatccatgacatattaataagaagttcatatcacacttgtcacttgattgttggtttgatttttttaatgaatttaaactaaattatataaaaatattattatcttattataatttagatactctcatgtgtttctaaggaatattcatggacaaataacactattttattagaagggaaaaaaaaaacgattttattttttaagcattttatttttgcttcttattgtttgaacgatgtcgatcatacgtttgtctaatcaataagcgaagtgtgtttgtgtaaaaagaaagaaaaaaacaaataattaacacaatatgaccaacaaaatttcgatagcttggcaactacaatccaaacttatcatattcagtacatttatcgacatattaccagttttaggtacagacatccaatggttaagagatagatcattaattattttaccgcagagttattatttgtagatcaatatggatctcttcaattttcaatatattaatatgtgagtactgttttgccgtccataaaataatagaattttggctacgtccctctgatcacgattcacatgtacatttcttatatgatctaaatgtactacaaccgaccacggctttgtatgcagagccacaaagctcagtactacacagttcgcaaggacgcaaagtactgtatatatttggaaatgacatctcaatcttgattgaacgtggaaaatatgaaaaaaggtatgcggcttacgttgtttacatttataacaaattaaaacttatgaacatatctactttcgtttatggttttaagttttatttgattcaaaagaataacactaaactagttgtctctagtgagctagtttttcttgtgatctcccgcttcctctttggccatatatttggttaagtgtattcttaatctcatttctctctaaattactatttcaaaactgtattacccaaaaggtcatagcaatgtaagttatttgaaagccctttctcaaaaaagaaagagaatagaggctaaataaggtaataaaaagtttgaatctgaatcaaaactaaacgattatgtattatatgttttcggtttgtaaaattttggctcacggccctgacattttcctacggcttttggtgggatgtgtgattaccttagaatgactctcaagatgccaaactaatgatgtttctaaaacttgccatgaagagggaagattagaacttatataattaatcttagtgggttttatgggtcgtcctggtttagttctactccatgggctatgttaatgttacagaagataaacagaaaaatgaaaacaaattttcaacttaagaaatggaaaccgctgtcatggaaaattcaaaagaaggcaaattaagcaaccaacgcagccacatgctttggtctcccttactcacttctccttcttatttcttcctcttctttcttatcctctttgtaccattcctacttatatatactccttcttacatgtctatattcgaacatatacttttcaaacaaacaaaaaaaaacctcaaaaaaaggaaaatatcactttatcttttagcatgacgaggcaaagaatgattacaattgagtcgccgaagaagaaaatgggtggaattgtgaagctcaagaatgttgtagagaggctggtgcaaatcaaaggcttttcctcggccaagaaaccgtgtcctgaagaatacggccgagattgtgtcccaaaagacgtaaaggaaggtcacttcgcggtgatagctgttgatgggtatcatgagcctacacaaagatttgttgtcccattgatgtttctagaacaccctatgttccgtaagcttctagaacaagcagaggaggaatacgggttctatcacgatggagcgctaatggtaccttgccggccaagccacctacggatgatattgaccgagcaatggtgttagaatttatgctgtagttaattactgatcaacgtcatattacataataataccgaattattcactagatggactcttgtgctttctagtcacttaagtttttctctatgctattggtataatggtatctaatgaataagctatcatcgtctctagcctcaaatttgcaaaacgaacagtttaaattacttcggcgaatattagtcttaattagaaaaaaaaactcaataaaatggtccaatactcagtgattttatatatcttctatcgtgaaaacagtccgttaaaatgttatttcagtgttgttagacttgagttaggactcttgtatgaaatggtgattagtagttgaaaatctcagcaaaagtgtgcttattatagaaaccctaggattttattgttctagacttctagtgcatgatgctgtagtaatacacgaagcctagacacacacaaacctcgatgtcttaatggactttattagtccactttacaacttgttaccacaaatattcttacacatgattaggaatagtgaaagtaggggaccgatacttgttataagtttggttcgaaattatagtaaattcacattggtaaagcatgaatacaagtaaaaactgatgtggaaagatatgagacgtctcttataaacattaagtcctgtagatcttttattgatgtttttttaccatatatacataaatgtatgtcacagtatagacgacgcaaagaaaaccaaaagaaatggtaggacaatgtacaccaatccgtacttgcattttctcaatcagtgccccctccatatcaccctatatgtatacccacacatggcttggtagaagttgattaggacgtgtctaaatatgggcattgtataaagtttcatctcttttatagtttctaacattacttccttaaaacagtggtttcaactatatagcattcgatcgattgtttttgtttttaagcttaaatatcaaatgaaaacacaatctctaatttctaatcaaagtttcttttctaagttgtaaatgcaaattaagagaggaaaataaaaggaattaaaaaactcatgctatgacggttgcttttgtattttacaaaaatattttatgaaaattcatatttaaaaatttgtttttgttaaaggaaaatatcttaagatattctacttttctatggttatgtaaaacatagaatatcttaagatattcaaaagattttttttttgatttgaaacactttagactacaatccagtactcagtttgatgattacacattacttgttgattagctttatatatataaatggaaattttttattatgaatatagataaaaatagatatatgtgataattgaatgtcaagtcatttttttgtacaactcacactgttatagaaaagatcatacgttgggtgttggcattaatatgtgaaagtgatttatagtttggactggttttggcaatggtgtttctctaaaatacttccgtcaggagttgtcatagaatttgcttacaaattacaaaaacgacaaattttccaacaatttaaattgtccttctgataattttttcaaagttctctccaattcccttttttaatctctgtaaaaagatttccaccaaaaaacttgcacaaaaaaacgtctcacaaacgcacacctaattttcgtcttattggaagcttattgtacaattgaggggaattagctaagagagttgaatagaaaccaaaccaactgtttaggcagttaaatcatgagtgagttaattccgaaaccaacagtatgtacgatacatgcattcaacacatatgcctacgtgtggaggttcacaaccactgtttaatatttggcaaacccaaagtcaaagttacgttcgaacaaaaaccatcgtagaaataaagtgagaacaacgaaatgagttaggggtgaaggtgcactttttgctagaatctgatgcatcaaatctgatgcatcaaatctgatgcatctagcaaaatgagagctcaaattgtaagatcagcaaacaaaaatacatcaaatctgatgcatctagcaaaacctttatggtgtttgatcacctcttacgtgcccttatttactttaaactgtataagaaaaagaaaaaacctcgaatgagactatacattacattggttgttgtgtagaacagtcaaatatcaaatttatatcatgcagacaaaaatgtcaaagctataaaatactcctatttttttagccacacagcctaactataaaactcaaattaattccaaggaaaaactagtataggaaatcaaagaaccatgatttaaggtcgatatgaaaaaatatagagatttggtaccttttggtcgtgccctacttctcttcaacaatgacaagagccaataaatatgaaacaatgaaaattatttagcatataaatgggtacttatggccacttggaaaagtatgtcgggaaaacatggagctgaaccggatacatcgtacatacattgatatttgatacataccaaggttatgttcaacttggagagagcggtcaaaagattcgagaaaaaaagaagaagattatattgaagttttaacatctaattgaagcttggaacatgttacatgtgtaaccggaaacatcagtttttggattgtggcttaacttgattgcactagaccggattactttattaaatttgaatatataaacgtaaaataaatttataaatgattataatggttattatgtgtcagattattaaagagatgtgcctccatctcttgctttctctcagtgctacaatcatgtgtgcttcgctctttttttcatagcttcttgttgatattctcaaacttctcttcatacttagaggttttaattcactctttcaatctagttctctttgttttgtgtctttttgataaacaccaaaacaattaagtaacttagagagaataaatttatgaactatacattttgttattggatcaaaggataatttcttacaacatctcacacacatacatatagtggtttctctacttgccatacacttgcatccatacttctactaacctagaccttacttctagacataattatcccatggttcacttacacaagcaacctaacaactacaacaattattatacttattctttagctatgctttagactaacaaaacatcactatttcttctttgggcctaacttaactaatagctcaacgctaaaaatattacaaaacacacaaagcccaactccttcttcttgttgacttttggcctttatttttgtgtcgttggcttctattcaggacatcattttttttttgataaaaggtgaaattttataccatttttgatttgtgacagagattacacggaacactagaaacggaataaagcaacctacaaaacttaaaaacaacatcactgcttccattgcttctcttcacggtatcttcttcttcttcgcttctgcttcttctcttttcttcatctacttcgaaacaacaacaaaaacatgtcgtgcataacaaaatctctgaactaaatatttctacacaaaaaataaatatttttttttgaatttaatgttaaattatattcaaagacaaataaactgtttatacataaaaatgcaaacttttcttaaattgaattaaaagtgtatcctatctatccttgattttgatcttgcattgaagcaaaccacacatggattcctcttgtgtacttctcttcacctctcacccttagcatgcttaatcgattccttatgtttttgtctattagcctgattagcttctccgtcatcgatggagtctctcctttctcctctcatttctttctctccagataaaaaaataaacattctattctctaatatcgtcaaaacttcatacgactatccttaaatcaatactttcgagtttggtttgttaaaaatgatggttttgttaaaaacaacaacaaaaacatgatgtaatattataaatctaaaagatcaataatattactaagatacattttataggctgattaaaacgatgaaaattgacaaattcatgcaaaagtttaaaactttaacatcatataagagaagaacaaaacaaatgatgtttacacttaacatgattttgtgatttttaaatcgacattaacttttttgaaactttgttgtttgttttttaataattaccatgttattttactgtatatgtatatctaaagaaaatctgtaacgcttttaaacaaacaaaaatggagaatatcaattcaatgacatatgtttactttactgtagaggaatctttaaattatagccgaataatttagttaagagatcttttcataaaattaattactagcttgaaggaggtttcataaaattaattacatgaagaaggcgtttaaaataaatatgccaattatattaaaatcccattataaaaaattattattctcatcttttattcctctacatatataaaaaaaataacctttctctttctcattacaattaggagaatataatttgacaaattaaccactttgactaagcaacttcaacactttcgccatcctaatccacatggtcataactcataagtcataaaccttttagtggaactagattttctccatgacatcttactggattagatcaaagatatttttaaggaacaaatcattaatttatattataaatcaaaggagaaaaataaagaataaggaaaatgcatagaaatgccactaaccatccacttctatggctatttccgcgaatcaatgcaaagtcattcatttattcccaacttgccccatatgttttctttttcttaatcacagattcttcttttttatttttaatccatagaacaaaaaaaatataacctttaaattttctctcatttcttcatcttcctctccacaaaacccattttaatggcggacgttagaaaccctacaaaaaatcatcatggtcatcatcatcttcatgctctcttgatcccatatccatttcaagggcatgtaaacccatttgtacacttagccatcaagctcgcgtcacaggggatcaccgtcactttcgtcaacactcattacatccaccaccagatcacaaacggctccgatggagatattttcgctggagttaggtcagagtctggccttgacataaggtacgcgacggtttccgatggtttaccggtcggatttgaccggtcgttgaaccatgacacgtaccaatcgtcgctgttgcacgtgttctatgcgcatgtggaagagcttgtggcgagtcttgttggaggagacggcggtgtgaatgtgatgatcgccgacacattctttgtttggccgtctgtggtggctaggaagtttggtttggtttgtgtctcgttttggaccgaagctgctttagtattttcactttattaccatatggatctgcttcggattcatggccattttggtgctcaaggtaattatcctctccttcttcttctttaatatttctttttttctgcctcattatttgtctcctattttgtttcattgataataacggtagatctttcaaatttaaacgaacacatttttttggtcttagtcaacgtctataattattttgaaatgcaagttagatttggagaaaagataatttgagtatttgcatgtttaccgatccaatagtcgaatattctgttagtattggactattggtagattactttatcatttagacagcttggagccttcgacataagttttttttttgtatgatatggtttatgttttatattatttttaaaaatatttttgtgttgcaaaaaaacattttgttgttgacacagtacaaataattttattgaagaaaaatttactaaagtaaaaaataaatacactaattaaaccttgcattttctattaatggtgtcaatgaatttgatttttcgtgtaagtacttttatggttgattaaaaatttacccacatatattatcagaaaaaagaaccatgctatcaaactattttactaaatattttattatttcataaaattatataatttcttttgaatttaaacaattatttatttgacgttagaaaaaacaattatttctttgatcctttttcttatttacaaatttactaccataatcatttttataaaaaaaattattcaaactaaattattaatttaaactacccttaaataataagcgttacgatttgccgaccaaaaaggaaaacaaaacaaaaaacaagtaatcgtaacgatagaagtaataataatagagtagggacttaacataaagcgtagggacttttacttttgtcatgtaatgatgcatgtgaataatgtcaggggtccaattaattcactttccactttttatttattcctttaactaatttacagaacgcatccttcaatttccttaattatctaaatcttccccataaattttatgttcttatcacagaaacccgcagcgatctaatcgactacattcccggagtcgccgcaattaacccaaaagacacggcgtcgtatcttcaagaaaccgacacgtcatcagtagttcatcaaatcatcttcaaagcattcgaagacgtgaaaaaagtcgattttgtactctgcaacacaattcagcaattcgaagacaaaacaatcaaagccctaaacacaaaaatcccattttacgcaatcggaccaatcataccattcaataaccaaaccggttcagtcacaacctcactctggtctgaatcagattgtacacaatggctcaacactaaaccaaaaagctccgtactttatatctcctttggtagttacgctcatgtcacaaagaaggatcttgttgagatagctcacgggattttgttgagtaaagttaatttcgtttgggtggtgagaccagacattgttagttcagacgaaaccaatccattaccagaagggtttgaaacagaagctggagatcgtgggattgtaataccatggtgttgtcaaatgacggttttgtcacatgagagtgttggtgggtttttgacacattgtggttggaactcgatattggagacgatttggtgtgaggttcctgtgttgtgttttccattgttgactgatcaggttacgaataggaagcttgtggttgatgattgggagattgggattaatctttgtgaagataagagtgattttggtagagatgaagttgggaggaatattaaccgtttgatgtgtggtgtttcgaaagagaagatcggacgggttaaaatgagtttggaaggtgcggtgagaaacagtggatcttcttcggagatgaatttaggtttgtttattgatggacttttgtctaaggttggtttatctaatgggaaagcttaaattctatgaaaactaaaaaaaaaaaatgtatgaatttttgtcaaattttttatttggggaaactactgtctcttaaatttaaatttacttttttctttaagtccaaagaaaaaaactctttcacaaaaacgtaattcaaattaccgtttactttgttttttttaaagttacatttatagaatggccgaataactttttatatcataaaataactatatactcattcatgcatattattttgattgacaattttttttttgcatagtcacactaaaaaacgggtattccaccattatgtgtgttaccaatcaatactgctttattagatctaaactttataccaaatcatcaatattttccaaacaaggctcaaacccgaccggattcaaagtttatttcactaattcaacttgtttggttttggttaaatttggaatcaaaatgtcaaactgaaatgaaccaaaaccaaaatttagttcaattccatcatttttgtttttttgttttcttattgcacttctgctctcagtttccaagtttgatttgattcactattttgtcactcttctataacatcaaaaaaagaagaaaaaaccattagtgattatgacattttttgggaaggtcccagtcccaattacactttttaaagattatttacatactttttgtgtactacatatcattcaacattcatacaatcaaatcatacacgttcacatatcatccaatttatagtgtagaaatataacaacacaaacattcataagccataatactaaaaatgaagtgtttattttattttatcttaaaatatttttttttcaacccaaatgagtctaaaaaagtaccaaagatgcatataaatattcaaaaaggtgttatctacccaaatttctagaaaaaaaagaaagaattgaactgttttcattttcacctaccaaaattacataagaggctaaagttatattatctaaaaacaatcactcatctacctagagctgttatttttcttatgactaagcagtaaacgaccagacacattcttgtttaggccaaaacgtagtaaaacataaacaagaagacggtagccaaaagccatcgctagcaacacaagcatgttcctccatttggcatttgtgtctggagatatttggtaatttccttggattgcttggtaacccgatatactcctcacttctccgaccgcaaacacttccccgaggtactcgttctccaaaagaccctacaacattcaaagcatacaagaatgttcttgagttttccctgggagaaaacagagattgtttgttttgagagttgattatgtaacctcaatggagtaggtgtggaacgagatgtaagcaaacgggtaagtccagacaggtttgggcaaggcggtacggattctgaagtgtcctgctgcgagcatcatgatcacctgcaatgatgcatatgaagaatgaaaatcctaaggcatgaataatcttaaggcaggcactaatcactctcatttctaatctaagtgattagtaagcaatagttgcaagttctataagctaataataatataatcactcctaacttcagctctcattgacttgagttaagaaccattctagttctggttggtgaatttcattgaacgctgttgagcataaatttccctaagtcgtaaatccagtactatctagcagtcagtgtaccaaatcaacattcaatccatgcaaaatcctagataggaaaagaagaacagtagaagaacatgaatcttaaattagataaatagtgcgaaagaaaaaactcacatgtacagagatgagagtcaaagtgctccagtaaacatctcgccaaatgcaagcaatgaagagcatcaatccttcgttcaccaataggcacatgaagaagttgagcacaaagtacatcaacaagctgaaatcatctcttaatccaaccatgaagtagaacacaagacttgaggaaatggacatgagaaacaagaacggtatgcttcccagaaactgccctagtaagaagacaaaagcgcccgaatgctggttcgatgcttcacttctataaatctattaaaagaaaaagtaaacttcagagctcaaaagaagaagtgatcaaagataagagaaatcaaaaaggagaaatagtcaccttgatttcttttaaaagtgaaggtattccagcaatccccaacagtgaagcaaacgagacaaaaacaaataccgcagcaactcttgtctgtaagaaatatttacaccgaacgataattgcatctcttggtactcaaatgtgacatgctgagaatggtttagaagacttactgcaacagaagacaaagagtgacctaagccagaatataatgtgccaatactaagtgtaagaatcatgtagaggataagtcggagccaatagtatttccattctcttgacataactaaaagtgatcgccatgtgagcactgcaacacgtgtagcagcaccggcctttcccttggatttaagctgtgtgccctcctgcaaatgatataggaaacaaaaagaaaattgatttactaacacatgtctatttacagttatgaagctatgatccaaaaattatcattagaaaattattaccctttcggtaagttttattatcatagcttcgacagaatcagcatctgcagatgatttataagtcgcctcgagagtgcgaatagcaacagcagtatccatgttcactgctgaaaagtccccattatcgtcctgtcgtttatatttagctcatatcagaaaactggcgttacaagaagctagaaagaaacaaaatcatataactcaaggtgtataatggtgtatgcacctgccagtttttgcacattgcaataatcctatcgaaatctgtgtttatagcccgcaaaaaatgatctgatggactttgcattatcgggcacgggaatccagcatttgaaaaatgcttcaaggagacagacacataacaagcaaacataatttagagagtgatcatttggccatgatatgagaaatttttcaagttcaaacaatttatacctgtaagcaagccagtgtctccccaaagaagagtgtgtttccatttgatagaaggcagattctatcaaacaaaccaaacacttcggtactactttgataaatggtgaatacaagagtacatcccatacttgcaagcttttttagtgtcaccatcataagcagtgccgaaacactataaaaagagcaaaggagccaattttagaatgcaagattttaccttttagtagaaggcaaataataacataagtctagaaatggttagaacctgtcaagatgataaagaggctcatcgatgaataagatatgtggtcgcatcacaagttcacgagcaatagagacacgtcttctttcaccacttcgaagacccttcatgtaacaatgaccaccgatcaatttgtttgcataatcactcagagacatggcctgtatcgcatcttcaacaacactccttttctgaaagaggaaacccggaagctgaagcaacgctgaatagtacaagaattcacgaactgtaagtgaaccaatcaattgtgtttccctctcaacaaatccctgcaatgcagcaaaccaagaatcagaaacacattacaaaccaaaaagaaaagatcaagaaaacaatatacaatagtgactcacataggatccataaggcatatgtgactttgagccattcacaaacacctcaccgtacatttttgctgaaggaggcaatcttcctataaaagatgtgattagatcaaatgaaaaaacaaactaacaatgaataaactgacaaatgacataccagcaagagccctcaatagagtagacttcccggattttgcaggacccataattacagtcatagtcccgggaaacgcataaccattcgaactctttacaaccttatcagaatattttctctttcccttcatagtaacagtcaaatctttccaagcaatagaagcaccagcaatctttctaacaacaccagtcccagctcctccttcaggaacaggaggagaagccattgatccgctattcatcttcgacaacgaaggagaaacaggcgttgttgtagcgtcattaatagaatcaccaccaccagcttcatcttccattcttaaatcaacatcaggtgtgtcttcccattcaggagagtcttcaaaagatataggttgtcgaagagaaccaggttttcttacatagaaaaagtgactagatggaactctactagtaggactacttgcagaagacgaagacgaacggtataaatccgattgagactgtatctcctccatcctttgacacctcaagaacacaaaatgttccaaagaaactacaaattttacaataaaatgtttagattccataatcaatgcaaccaaaacaaaaaggccaataagtgaagagactactatatatagtaggaatcagtgaagcactattaaaaatctaaactttttccaaaagctcactaaattacagtttagtgactagtgagaagtgattcctaattaagtaacttagtataaatcataaaaaccctaacttttttcagtttctgcattattgagacactgaaacagagtaacttcaagttcatagattttctcagcaactaaacgaagactaagcaggagaagagactcagttcgagttatgatgagaacaagatagagaaggagacaaacctggatctgagtgaagtaagatccacagagaaagacgcacagagactggagaatctcttcttggtagcaagagtgagagagctctcaagtgacgacgtctctctaaccaaaccctttgggttccgcaaataaagaaacaaaaaaatggattgggaattgttttttgttttgtctgaaaccaaatgctttaacgaattacataaaagtgagcaaaattccattttttttaccttttaagaaaaaaaaatcatattattgtataaaaatataaacttaatttgcataaaaagaattatttatagaaagtattgtgaaaataggatttcttaaaatttgaaggcactatggcatttttgcagatattatatttttcctttggatttttttctttttagttaagtttttcctttggatatataaagttattttggggcttagttgaagtaaaaaagtttttatttctattagaaattttaaacaatgcctattttcacaatactcttgtgaaaaaatgtcaatatagaaaataatttaaagaaaaaaaatactaacttcaactttaagcttttttgttcgtttaagctttagatatctgaacaaaggtttggcctagtgcttttcttaattatgcaaacaaattgctgacattttaaacgatataatacaaaattttgaaatatcttgctcttttttggtattagtatcagcttttcttctttttatttaatgatattaattgaaaagaaaagaaaaagaaagtgatatttggttatctttataatcaagcatgaagaaaccagctacttaaaataagaaaaaaatattgtttgtatgataaatggcttacagattttttttcattttttctcgatgttaacgttatttgagtaactatttactatctgaatgggaaacactatttggttttgttgaaattggtggcaagttttaagtgggcttgaagaagtaaaacggcccatacacaaatttgcaattatttccctctttccgatcattttccttgaaatcgttcacgtgatccatgatactcctcctccattgccactctatttagcaatttactcttctgctctcttttttttttctttctttcaagtttcaccatgcaaagacagaaaatataagaaaatgcttcatttggtattcttggttttcctataaaatgaatatatcgacctatccaaggctagtagcttgatttttgtagtgggtaacttcaaaaggaagagtctctcaagaccaggagtttggttctcggcggtgggaaaatgattcatttagcctgtttttgtttgtagttcaaaaatctacgtaccaaaaccccgaaaattttggtcaaccaaaaataaaatccgaactatataactgcgttatcatctattcggcactacataggaacttgaggtaacaaacttaacattttcttgtttttctactacaagaaaactgtccaattttcgaccatgaatttagtcagaaattggtcaaaaacaaccctgaataaaagcaataaagaagagttatccaaaactaaaaatttgaataaaaaagcatagaaaataacacatacttttgcattacatacgtcttcataaatatagacaccaaaagaatcaacacatcagtcttatttgtataattaaattctcaaaatagaagagaaaataatcaaggcgatatcttggaccgggaggtaactttagatgaggaacacttaatggaaacaagaggctgataatttacaaaccggctcggagcggatcttggtcggaaccctttaggcatacaactctttacttgtgtcccatgaaaaatctgattcctcggattcaatttgaccgtgtcttcgactgataaaggcatcatcgacgagcttggaacactctccagtggtattagtctccctccagcgtacaagaataaaaggtttagagtgataatgacaatatgaactcttgtgttgaacattgggttttagtttgaagtaattatttttgtttttttgagagagtttggaatgataatgtgagggatatataagtgggaggagatatacactggtttagggttaaagttcataaatgggctcgtgagtgatggctggaaacataagagagaagagtaagtaggagaggacagaggcaaaatggctggaaaatggtattaatcaaaatacgattttatatgtgtgatagagatacaaaaaagtgttgatggggtcgggaagatcagaaagaggtaggaaagtccgtgagtttcagaaattacaatcaaagatcaaacatttgtctttgcatttatgaattatgacacactcacacgcaattttctatattttcaaactattgtttctcttgttttaaaatggtttggagattggacatggatttttaaatatatatattattatgtacacggttgcatgggttttcgggactattggattttgctttcttttggataacaaaaacacgataaatatttcattaaaccatacaaatcttcgattgataaatacatatacgaaaacatacctaaggaaaaggaatccattgttgtaggatttaggtaccatgcggttttccaaaccatagagtaatctcatatgtattgaaatttaaaaaaaaaaaaatacaaagaagaactaaaaaacagaaaaaaaaaactaagaaaatagggaaattaagttggagtctctttaatttgttttttttttgtcatctagagttattttaatgttaccatgatgaaatacttgataaaatacaacattaaaccgaaagaaaacgagattttttcgaagtttaagccctaagtaaaaaagtcataaataatactacaaagcaagaggaaaaaagcaatagtagttgaaatcccaccaaaactataagtcgcatagttcttgaagattatttgaaagaaaagtatcgcggatgcccaccaccaaccaacgatacacaagtcctcctattgagatgaacaacaaccttcagatttcagaatttttaagctttataacctgataaccactgcccaaactttctttcgtatgtggtgatgtcataaatcgacaagaaacaataaacattaagattatgtgccttcattggatcatggactgaaaattaagctcttcgatcaactaaaacaaatttatcatcattgttttcatactcgctgctaagtttgcaggggagtattagagtccacaactaaaacaagtccaaacccaatgtgaggtctacataagtagaattttaacaagttagaagattcatataaacaattatgtaatgagaactatgattgtaactttgagagaactctcttccttcatcttatgaaatatcaaatctagaaacattggcttttggtgacaaaccttaagctcctttacatttttctcttctttacatttcaataaagctcactagaactattgcatttctatctttatataataagctcaatgaacatcaatctatatttgtcttaaaaatgtcaaataaatagaagtttcatgaaaggaccagacctcgatcaagtctgagaagcatagacaaggagtgaagatttagtctcgataacaccattcttaagagacgaaaaaaggtaaaagatcgaatcgcatagaatcaaagaaatcttcacatattcagaggaaaaacagcatgtctagcgaacactagagtcgaacaaaagcaaaccaccaatcacacatccttatttgtcaattatttattttggaaactaaaaagaaagttaatgagtaaaatagtttccataagaagaaaaaaaatgttttctgaggaaagaaaatgttttcgaaggacagcaaagtttaagccaataagcaaaacaaaagctgatgcttgtcgcgactgtgttcgtcaagaatctccaggacgaacccaatcttctctctcgaagctgtctaaaattaatcaatcaatcattgagctaatcatattctaggttaagtaaaaacagagtaaaccctctctttttttctctttctctgcctttctcaatttcgtttcgtctccttcgttcttccaatttccgtctgattttatacgaaatttgcattgatatcgaagtaaaatcgaatacccatgattcaaaatttcattttttatgcgactgattcctcaattttgattttccggtgatttctagggttttctattaggtgggtgttatttatcatttgatgggtcatttactgatgattttgcaggtttttgttttaaggatttgtgtagactttcattgctgctacgtttttgaaagggtaatttgaagggcttagcttcccaaaggtgagaattttaactccagtttggcttctgatattgtgttcattgttatgtatttttaagcttagtagttgtgttttaaagttgttccagtttggttgataagtgtgtatgtgtgttcatcagattgggtgagtacagttctttcattgatatctccagttgatttgtgggaattttgttctgtgtgtataggatttagacctcaaatattggattctctttaagcatttaagtgcctggtttcttcatcatcacttgataggaggactttacaaattttattctgaacatggaatttggttagccgaataacttcgtggggattagtttctcgtgcaaggaaattcttcatggttctgtcttggaagtgtttggaatcttgaagcttgatagattttcgatgtaggcatgatgcggttttcttataggtttaaagggtctttagctgagatatggttcctatggtgtgtaataggtttaaagggtctttagatgagataaaactgtgcaaagagttcatataataaatggttaaatcctatatattatctgttcagtgtacatagagaagaattagctgtggaatttggatgtacatgataataacaatgtagtttatgtcttccaacttgtctctgttgtgataatgatcaatgtgtttctattctaactcctgtggtccattgatttttgaatcctttgtccaccttagtactttcttcgaagaaggcatgggaaaatatgattctctggtccaactttcttaagactgtctgcatctttggatccttagatttgtctacgggattatgaattatttgacttttgataccgattagacaaaagtcttacatttcacacaaataagagtttgcatcattgtagagaacaacattgttttcatttctgcttcagtgtttttgagttgaaatgtaaacacctctttctcttagattagtttgaatggcacttgagctggtgtgacctacattcattttgattgtttactttgcatgctattgcggtttagttatgattatattttgtttcaggcactaggtggcaatcttatccaagatgaacagtcaaaatcctgatgatcatgtaagccagctaaaacacctttttgccttcaaccaactaatcgagtaatttccagtctcccgctcgatttttcaatcttttatcgttttcttaaacataggaggacacaacggttgtgggatttgaagtacctgtatcaccggtttcaagttacaacaatgtgtattcctcaaccgaagatgagacaagagatcctccagcagtaccgccacaccttcaacactctctattaggcaatcagggtagcatggaactggcttatgcgccacagaatgttgtcctgaaccacctctatatcgagaaccgagacgccccaagatctgttgtagcactcggtttctcgcatcggttcaggactaagtttgtcactgtggtgatatacaagcctgtccaaagaagagggagcgccaatgtttgaataatgatacctctttttaagtagtgttgggaatttgcttctttatggattgaatttggtatacaaaaccatctggtccgtactgaattttattcttctcttacagattcgatttagacggtttctaggtacattcgattgaaatcatcttcttgttcggagtttatataaaatctccatgcatttttattttttaggcccaaaaaagctgatagacgtgggcattgtttgtttgtaataactcccttagattgggtttagttaaacgagcccaaatatcgctaatgaagttctttacttgctcatatgtagtgttaccataaattatttaaatctttcgtagctccaaaaaggaaaaaaaaaaaaaaaaatcttaatcaaaactttctatgtccgagataagttaccaaactaatgctctaaaactggattggatcgtcggatcaatgcattagtctaaaactggattggatcgtcggatcattgcattagttcggtttgaatgtagatcacttatactctcgttgtttttaattaagtgtagttttaaggttttttatttttttttaatataagtgttgttttcacttttctatgcaaacattaaatgtatttaataatttttaattaattatatttttttactggttggattagttgtaattaatgatgtttttataggaaaaagataaattaaataaaatttgtatgttttcttaatttgtgtgcaaaaactttaaactacaaatattcagtaacagagggagtatataaaaacaaagttggtttgtgcatgggagcttatttgcacaaaattgattaaaaaatgggttctggatattaataagactatgattaatatccagaaccctatatttttttcaatttcatcgaaagtttcatcaatgtaacgttaaaacaaattatacatcttacaaccgtcagaaactactttaaatccatgatatcacatatatgaaactaacattattatttgaacaaattaaaaaacattatattacgcattataacattgaaaaacaaaacaaaataactaatatagaataaaataaattgtatccggattggaaattgcttatctgatattttttttaaccgtattttaacttagaacaaaaaaaacagagtgtagggaaacataaattctaccaaattcgaatatataagaaaaacataaaaaaaaattaacaaataaattaaataatggaaaaagcagataggagagctaatggtttagtggcgaatctaaattctgtccaaagaattgtctgacctcccctagctcaacatcttgggaagaatattaatttatccgttttgttcatccgcctaaagagataatttatctgcaaagtttttttatatttgtaaagtcattcggttttgccaagttttactaggtctaggtagattaaaaagtaaattcggtttgaaagttatatttgggttggattactgtccaagttacgggtataccggtccaaattcaataacacatccaataaaattttcgatcttaaaacatcttctttgacctgtccggataggtaaatgtctaaatctctttttgaaattaggtatgaaatctcatagaactagaatgtaactccaaaatgattcttgaacatgagtgtgactagccaagagcataccaaatttaagatcattatgatatgtccaaactccaaatttaagccacacttattttctcaaaattatacagaactatgatttactaaaattggattctctgtctatttttggtatagctattatcctagtgaattagcacaatgttattatatgcgctctctgctaaaagtaaaaaccagctatcttgtcaaaacaaaaataaaaagtttcttaaccaacacatgaaactgataaatactatataatataaaattaacatatatcgctatcaaatcatatatcgtaggtccataatctttcttttaaaattcatatgagtctttttaatttattaattttgtcgtgctcataatgttttccctctaaatcctagtttttgtagttttctgctatgcaggtatttgtaaacaacttatatttttggaaatttggactctaaaatatagaaaaggctataaaataaacactgtgatgtggcatatgtgttgtacacctttgaatctgacaataaattactcgatctagtgtaacttttgcatatgagattttcttttgtcgtctatatattactttgtttcaaagtttaataatacaaaaaaaaaagtgtctttcatttgatttgttgacacagagcaaagccaatgaggattcgaaacgttgtaattagtactcatagttggctgactttgtctatcgacataatgtgttgcttctctcattatgagattccattagtacaattttttttttcggcgcatcaaaacatttctattaaatcgttttttttgttctcatcgaatttggtgatgggttaaaatccaaaatctttagacgaaaaagcaatgatttattccattagcattatacatttcattttcacattgaattggaaaagtaaaagaaagtgaagaagaggggaccagacaggaactggggtgatagagtttggtccatggctctgtccttgagcccattggtcacgtggcaaggagtgtcttactggtgcacttttatgaaacaaccatgagtgtcacgtgacgtaccattggggctattggtccacctcaacctcattggagccatgtcattacatttatcctgtttacttttctcttaataaaaagtttataagattacaagtttttgttagaaaaaaaacacacaaaagaattagcctagaaactaacaaaaaacaatgacactggacatacatttgtcgtatgcttaggacaatgaaacatgctttaatcttctaaacgaatttaacaatttcatgatatatatttttttgtatatattttatggatttcacgataggaagatgtctaagctatatttacaaaaaaaaaaatgtcaaagctgattgtttaacccgtttatccgaaaccaaaattaacgatatttttcgaaaaaaattgtttcttccaattaaacaattaatcaaaaaaatagttaaatttatatggggtaaaaaaaatttgttgtgttgtatataggtaggggaaaagaggtggctacgaaatcatgacggttcgaagagaacacgtaataaagaacgccaacttgtcaacaaaatctgcacctatccacttcagactgtacggacttggggtccctttcaggtggcctgattcgaatctcacctttagatacttttcaatattttggacaatgaaaatcaaatttaatggaaagatacgaaatgtggactagataagatatgtattcccttacattatttttataatctgctaaattatgaactaacagttcatatttattgggctaaagaattccagtttatagactaacttttattttagttggtagatatgatataaaccgctcaagacattggttaggaattaggactacacacgcgctaaattcacgttgagaactggctggcccagtgtcaagtggttttctttcgaaattatttgaatttaaaactgttataactaataaaacaacaaaattatgaataaaatacgaaagtttgttattgatagtccgatagaaaagcagattaatatctaaagctatgctaccgttttattcaaataatttaaaaatcaaaattaatctcttatagtctcattagtcttggcacacacaattttaaacaactactcttcacctacacccgaaaaagaggcgtgagtattagtgaaaatggtcattctagcatgtatgctaacacgataacaacgagcaatgagcaattcaatgcaatcaatataacctattttcatgtaattcagtttccctttttcattctccatcagtttcactttttaaagaccacacactccaaaggcatctaacgatcccaaaaattacaaactggctttgtaagctataacaaattaacaactaccaaaaatagttatacctttttattttattttattttcttctaaattctgttatttttcttttctaaaatctagtttaaacacagtgacgtaacttggcaagtgcgtattggtaatgataaaaatattcccatgatattatagtttagtgttagtagtctaataataattgcggtaatcctttttccaagggttttcaaaaactatctttaccctaaaccaagtaacctttatcgaatagatagtggacaattattttataaataataatacttcaaaaaaataatccagagaccagatcctcgtaatagcatcagagttccttgggttcaacaaagtacttcaaaccacctgaatagtgaagagtgaagaccatactttcgagttttctatattatcagtaaacatatacaatacacaaatattaatctggttaaagttactagttaatttttcaaacaattggtatatatatggatttgcttttcctgctaatcgaaataaatatatgattagtggggtatataattatatatataaatatatatagcttttactttctttaaataaaagtcgggttcatccactttatatactccctttctttcaatttatttgatgtataaaggtttgccacaaaaattaagaaatcgttgagagcaaaaattaatatgcaaaccgccaatattaaaactcccaacttcgagagagacacgtccagaatcaagcaccacaccccccattttgttgttttctcttcaactcttacacattgtatgacaaacatattataataactaaccaatgaaaatggtttttttacatgacatttggcaggtaattaaaggaggtccgtctgctaatactttattaggttaaacaagtatgatctataaactaaatttactacacatggtagagtaaatgtagtcaggatccttaactaaagattaattttattcgttattatagatgccattgagaatttgagattataggttttgtttcaagtataatataaatcttattataatgtttaatataagaagctaatacatatatgtatatttgggaatgtggttttcgaactttgcttgatgacaataattttctattcgtgatgcaccaatcgtttcattttgtagacagacatttttcattgaccacttttaacacgtgaactcttctctttcatttctttagttcaattcgaaataaaactgtttggaccattttcttgtgtgcgtaaaatctttgtcttgtagatcttttggtttaaagatcagtttgtgtgcatgttttggcggtatcatcggttttgctaacctgtagtacttagagaaattattgtttctactttctactatgtactccatagattgaattaatatcttttgctacagcttttcttagtacaaaaacaggtttaaggttcactgtgtcccgggttcaaatttctttgagagatgattaattacgtcctgtcgtagtattcatatgtgtacacatagtatttatgccgtcttggatctcaatatgtgtcaacaatcaattttttgtatatattaaaaacaacattcagataattccttgaatctatatattttactatcccatctatttttggatatatatatatatatatacatatatatatatatatatatatatatatatatctaattgcaatgcatcgacgacaccggagtaatgcaaggttcaacttgttttgcaaagaccatgctaacacaacaacattccggaatcacagaaaaatccgagtaattttaaagtgaatttaattgacttaccaaaatacagtccatgaaatcaatactgtgccattattgcttaccaaaaataccataactttgtttctagtgagaattgaactcagggcagaaaagtacatattcttttcccaagacaatttggcaatgtttttcttcttaacctaaatagattcaattcaactaaacgaattactaaattattactctttgttttgccactctctttttaattcgtcttaccgtttatctttaagtttctctacgtttttaagttgtaatcactaaattattttcactacactgttaaaggcttaaagcttaccaccaaatgttatttaatttcactgaactgttaaaactttagctacttcaaattgctattctttttgttctttttttttataaggggcatagatccaataatagttgcgcaaataagaagaagtttacacatgtgaagtgggaaagtgagatattccttcacgaggtggactccaagatggcagctcctaactccatttgtcccaactctctttaccataactcaacttctgccaatcaaactctcttcataaaatatttatgcatatattaacatttagtaacaaaaattcaacatatgtatatatgataccaaataaatcaacatatatattattacacagtcacatctcttactgtgcatatatatttagacaaacacatctctctctctctctctctctcatctgtgttctagatctcaccaggtctttctctggttaatatatggcttccaagatctggtaatatgttataaatacgtcatacttaagcttttttcaaatcaaaaatagaaatttgtgggtttgtctcgttttactattttagcagtatatattaagaagttcagatgttattcgatcatctgtttttgcttcccctctgccatctttatcttttagggtttcaattctttttcacttttttcttctggtttggagatggttaggttccaactaagtatacgagattaaatttgacatcttagttacttcaaaattccttcaatcaaaacaagtcatctcgactattccgccatgtttgtatatacatatttatatattatatatatgaaggtacgagtttctagtgtctataaattaagaaggttaagtaccatatagatgatatttgttaagtagtaagtcactcaaagtttgagtttgggtttgagtttgagtttgagtttgagtttgagagacaaaagattactacaagaagattgttaaacaaaaatggaagactaatttccggagccacggtcgttgttggctgctgtggcatcatcaagattcacatctgttgatggacggtggtgattcactctccacaaagttctctatgaaaatgagaatcttgatgatgctgcatcggcaatcaacgactattctttccctctctctctctctccctctgtatagattatttggattccatccagatcttcttcaggtaggtttgtttctacttgaagtttttttttttcacctttatgttaacatatcctcccgtttatttttatttgttatacataaagatctgacaaagaacttttgtgggtatcttgtttcatgtgataacattgagcatttgatctcaggtttttggcagtctttatcaagacattaatagatccacaagcttctatttcaataagtgaacaagagtcacaacatcaagatcagtaaggtaagagagatctacttaaggtaactaatatatatgccttatttcttatgttgccaatcccaccttgcatttccaaaacaacacaatatagttttgttttgttagaaacaaaaaaggatattatatatggaagttgagataatatatataacaggtctatatggaactattgttgtctagcaaagaaaaggttttcaagacacactgtcagttctttgttttgttggttcatgttggctattacattcaaattgagaatcaatcaagaacttgttgggtggaccttacacacattgtaggctaggcatattcagtccaacctatttgtgtcccctctatttacatatttagatttcgtccttataactgatattgaaacaatgaagaatatatactctctttttctctttattctgttataagggaacaataaatctatagcatcatatatactcagactgtgaacaaaacctattcacagttatgagtttcatgttttgtttatgagcacaacctcccaaacttgtttccaaaacaaattctataaatattagtattatttttggttattatgtcttgtagtacatcttgttatatgtgtgtttagtaatgttttctatgttatggagatgtgtgtgtctaaattactttccattagtcattgtagaaataaatctttttttttttatcatagcttccactatgaatcgaatggttttgagcaatgccttggatgacctagacttcgtccataagtggaagccaaatcattctatcagtaccaatatagcaagttggcagctattttcacatcatgatgatatctttgatatgtccgtcaatcacgtatatttttggatatatttttcagtattgccaaatgaaattgttgttttacgaaaataagtacctcaattaatataatatgtcttcactccaacttgcagctatattgctaatcacataagtagtaccactattcatctttgttatctcttatctctaaacattctattaattatcgcttattgttctctcttttggctaatatatttaccaatttgggtccctaaatggactcgatatgttttaatcggaagaattttatgtgtaaatattttgtgttatgattatcttcgtatttatcgaaatagctagtttgctgtttcatcgcttttatatataaatgcaaaacaaaacataaatacattagaatctttgcgtataatggatctgacaaaatgagatggtaatattagctcgaggggatgaatatatgtgtgtggtccattagcattgaaatcaaacgcaacgctgagtatgtgaggaccatttctttatagtcgtatctattattcccaattttctcaaacttcaagcttttaatgtgtttgtcttactaatttggctcagtttactatttatagctttagacgatatcttctttcaagtattttgtatgccgagcaatttttgaaagtgatatatttacaaattgtttttaccgaattcaacaagtttgctctaccaatatagcaattcaatgtcacatttttacccttatcaaaagaattgacgagacagtttacctttgatatagaaaaacaaatatttctctgactacaaacttttttttattgtctttctcactcagaattttctaattattatgtgattgtttctctttctatttatagctcccacaatattttttaatatacatttggattatgttgaaatgattaaagtaatatatatgacacaaagtaatatatattcttaatacgtactgacgtacacatcacatacatgtggataatagataagataggtcgacccaaattcagaagtagagttatgaaaacgttaacgaaaaataagaggaaattattatccacttttaacatttattcacgcatatgccttatcaatatttcagtagcaccaactagcggaatccaatgagtgggcattacaaaatgtatatatatatgatttcaaaatgtcattttttctttttaacaataaagtatgatttctcggttgaaacattgtaaaattatatttcttttgttaaaacattgtaaaatggatgcatattcaataactattacataagattaaattgatatatacgcttcttcgtttaaactgaaacataacatgacagtcagttttatcaaaacaataaacaaaacatgacagtaatgtgtattatgtttatgaactaacaataagaaaatgtgtgtaatatagtatattaagtaacatgtgtgtaaaatatatatatatatatatatatatatatatatatatatatgtcttatatatatatatgtgatacataacataatgttaacataaccaaaaatgtttcagcaagctattggttacaagatgagaagaaacataatgggaactgaaattgatgctttagaagacaatcatacatggaatcttgaaactttgccccgaaagaaaaaaaggcaattgtgtgcaaatgaatatattatagtaaaatactgatctcatggaaccatagagtgagatatacaaacccagactcgtggcactcagaaaccgacagactgaatgtgttgattatggagatacatttgttctagtagctaaaatgggaattattctttatagcgagaagtgattggtcagtagatcagatgtatgtcgaacaatgtctttgtacatggagatctcttccaagaggtccatatgagattgcctataataagccattttttcttaagctataataagcctataacttagataataaataaaatgttcggagacatgaaggtgataaacaaatcatgccgttctcatattagaaaaccgaacatcttgccacttttgtagcggccggttcaaatttccagttctgatgaacggagtggtgagtgagccaaagccgccgacgagacgattcgatgactccgcaatgcttcttgaaaaccctgaagacagctaaacaaacttatacattctcaatctacaagcttctcctcaattcttcctctataaaccaaactcttgcttcaccggaaacaccactctccgatctcaatctctccactcttcgccgtattttatcagacccagatatcaaatcctggaaatgcatctcccttttcaatttcatcctggagaacccatctcttttctcattccaacctgatctcagaactcacttgtctctcactttccgtgtcttgtcggagaggagattctcatatgcgaaagaactcttgaagcctgtggctattgatgacattctcaggtacccttttaatgtaatcgtctctagcgttattgatgaatgtggttgtgagaagaaagttgttgggaggttctttaattcgatgattatggtttattcagacaatggaaaatttagtgaagttgttgaggtttttgagtatatgaagaacaatgaagttaagattgatgaaaagacttgtactttgcatttgttgaatctcaagagatgtgatcagatggaactagctagagatttctttagtctaatggttgagtcagggattgatgttgttactgtgtactctttaactgttgttgttacggtgttgtgttgcaatggggagattacaagagcaagagaattggtggaggagatggggttggttaaaggggttaaggctaatattgttacgtttaagtcgatgattggttgttgtgtgaaaagatgggattttgaagagttggatttggttcttaagttaatggagaaggaaagtgtgatgcttgatctcgatagttacaaggttttgattgatgggtttactagttatggtaaggttgaagaagcagagaggttggttttgatgatgcatgataagaagttaagagtggagagttatctgtataatttgattatgaatgggtactctcggtttggactagtggagaaagtgattgaactatatagcgaaatgagttctcgaggtgttactccgaacaaagatacgtattgggtgttgatgaatggactttgcaaagctgggaaagtttgtgaagcgatgagttttttgaatgagttgcgagtgaatgagtttgagattgatgaagaaatgtatagtacattgagtgaagagtgttacagagtaggaatgatagataaatctttggaagtggtggctgagatgattagggatggattcattcctggtgctacgatatgtgaaagattagctgattcgttgtttgaagtaaacaggaaagaggcacaaatgctgattaccattgtggttaagtgtggtattaaaccaaaatcgtgttctcaatatggtctgaaatgaagatgtggtcgtagtcgaggaagacttatcttctttcttattacctaaagagtgagatgacacgcctttcccttaccaagtctccaagtccaactacaaaaacttaatgtcgaagatatggtaatctagctgactagctcaactaagactcaaagatacacatgaagtatagtgatgtgcacatagttgttccatacctccaaaagatacattctttgaaagatttgtggttccggatgaagatgaaagggaatggtgacaggagaaggattgatatggggaccgaggacgaggaacgttagtttgattaggtccatgttgctaactctttcatgacaaccaaaataaggtcgagggactacttgaagattgaaggtaaatcgcaaaattttgaatctcataacttttttttctttctttttaatactataacaggagaacaaaatattagcaagcttatggcaataatattatattttcgtttaaaaaaattcaaaattatgttttgatagaatttttgtcaccattttagtcttttgataaaatcatgtatatgtaatattattttcccttatatagacttcatatcttcaatattttccttgataacatttcttatattatcttaattgtgatatttaataaaatatagctctttgattgtattattaattattgctactaaacttaagattttatttttgttatttggaatgtaatctgttatttctttatataaatataactaattaatataattatatatatatgtaatgtaatctgttatttctttatattgatgaaacttaacataaaaaaaaacaataaatacattgcattgtgtctgaaaacccaaaaatattattcgatagcaatgtctcttgcaaccacaatgatcgccatctttcttcaaatcattacatattttctcattaccaccacagcctcatcacctcagggcttcactatcgacttgatccaccgtcgctccaatgcatcttcttctcgagtctttaatactcagctcggatcaccttacgctgataccgtctttgatacctacgagtacctgatgaaactacaaatcggtactcctcctttcgagatcgaagctgtcttagacaccggaagcgagcacatatggacacaatgtttgccttgtgttcactgctacaaccaaaccgctcccatattcgacccttccaaatcctcaaccttcaaagagataagatgcgacacacatgatcactcttgtccttacgagcttgtctacggcggcaaaagctacaccaagggaaccttagtgaccgagacagtcacgatccattccacttcagggcaaccctttgtgatgcctgaaacaattattggttgtggccgcaacaactcagggtttaaaccgggttttgcgggcgttgttggtctagacagaggacctaaatccctcatcactcagatgggcggtgagtacccaggtttgatgtcttactgttttgctggtaagggaactagtaagatcaattttggagcgaatgctattgtggcaggagatggggttgtatcaactactgtgttcgtcaagaccgcgaaaccaggtttctattacctaaacctagacgcggtcagcgttgggaacacccgcattgagacagtggggacaccctttcatgccttaaaagggaacatagtgatagactctggaagcactctcacgtactttcctgagagctactgcaacctagtaagaaaggcagtggaacaggttgtgacagcggttcgattcccgcgcagtgacattctttgctactattcaaagaccatagatatctttccggtgatcacaatgcatttttctggcggtgcggatcttgtcttggataagtacaatatgtatgtggcatcgaatacaggaggagttttttgcctggctattatatgtaatagtccaatagaagaagctatctttgggaacagagcacagaacaatttcttggtgggttatgattcttcttcactgctggtttctttcaagcccaccaattgttctgctttgtggaattgaagtaacaaaccctagagagtctcttttccatcattttcaacttcagtttgtttttctcggttaacttcagtttgttatttatatatatcttatcaaaataaaagcatagaccatggatatgtttatatgaataatatgcaaagttacttagaatctgtatatttcttgcattgatatgggttgcttaaggattggcaagattaacaccttccaaatgataatattaacaagtttgtagaaaaacagaaagaaacctataatacgtaaagtctcatattccaaacctctttagagccctagcagccacaagttgtgataattaactcctcccaccgagccgtttgagccctctcatatgttcaaatataacttcagactctggtgagataccataggtaggagatggttttatggcaagaagattaagttatccaaaaccaatatctatctataaaagtatattttgaattttaggttcatcaacaataactttagactaaaatttccaagaaattatacattttgctatagcaaggtgatcatctaatttccattaatacaaaaagtcaatctaaaagaatgtaaaacctagagagaaaaataaaacttagtagtaacaaaatgtaaaattcccccaagttagaagacgtaatggcaataacaaaattgaacgaagttgacaaaattgaaaacttaacaattacgacaaaaggtctaacatgtataaatatgtgcatgaattaatgaagaacattacattgtgtctgaaaaaccaaaaatattattcgatatcaatcaatgtctcttgcaaccacaatgatcgttctttttcttcaaatcattacatgttctctcttcacgaccactgcctcatcacctcacggcttcaccattgacttgatccagcgtcgttcgaattcatcttcttctcgactgtccaaaaatcagttgcaaggagcatcaccttacgccgatactttatttgactacaacatctatctaatgaaactacaagtcggtactcctcctttcgagatcgaagcggagatagacacaggaagtgacctcatatggacacaatgtatgccttgtactaactgctacagccaatacgctcctatattcgacccttcgaattcttcaaccttcaaagaaaaaagatgcaacgggaactcttgtcattacaagattatctacgcggacacaacctattccaagggaaccttggcaaccgagacggtcacgatccattccacttcaggggaaccctttgtgatgcctgaaaccactattggttgtggccacaacagctcatggtttaaacctactttttcgggcatggttggtctaagctggggaccttcatcgctcatcactcagatgggcggtgagtacccaggtttgatgtcttactgttttgctagtcaaggaactagtaagatcaattttggaacaaatgctattgttgcaggagatggggttgtatcaaccactatgtttctcacgacggcgaaaccaggtttatattacctaaatctagacgcggtcagcgttggggacacccatgttgagacaatggggacaacgtttcatgcgttagaagggaacataattatagactctggaaccactctaacctactttcctgtgagctactgcaacctagtaagagaggcagtggatcattatgtgacagcggttcgaacagccgaccctaccggcaatgacatgctttgctactacacggacaccatagatatctttcccgtgatcacaatgcatttttctggcggtgcggatcttgtcttggataagtataacatgtatatcgaaacgattacgagaggaaccttttgtctggctattatatgtaataatccaccacaagatgctatctttgggaacagagcacagaacaattttttggtgggttatgattcttcttcacttttggtttctttcagtcccaccaattgttctgcattgtggaattgaagaaacaaaccctagagagtctctttttgacctttttatagttataacttctatttatttgtccgtttttaattaaaagcatacgacatagataggttttaatgaaagaatatgccaatgagttacataattaatcgaaattcaaatcacaatctgctataaaagtccaatttttttctcaatgcttcttatagataaacatggctaacgaaatcactaataacgcaaaacacagaattc

SEQ ID NO: 297 - DNA, 73079 bp, Arabidopsis thaliana
aagcttcacactcactccaaagtccataccaatacccttctcttctccttaatttctctaccatttacgttacctattgagagcaaatataaaatagccaatttatgaaattgggtgaaatagataaatcatgaaactggttataagtcttgttttcttattgtcttttcagaagtcaaaaagattatgtaataacaaccacttctattacacctttgttttctaaagttttttttttttacatgtttcacttctctcttgtttagtgaaagcaatttctttttaaaaacatctaagaatttgaaatggagaaagtaacaaacaacataataaagctcaatcaaaatgtataaatcttacacaatatcaataaaaagggcttcacacatgtcctatgaaaacctaatttagtgtaaaatatttgatatacaaaagtaaaagtttttttaatatattaattatatagaaagaaaaaagaaaaacaaatctaatctttcaccatcttcccaagatactctttatcagcatcagccaatcggttctgaaacattgtccattccattttgcatctatctctcactccttgccatggagctttcccattctctgactttccttgacttccaagtgaaggtatcactttatgtattatccattgcgaatccacaacaccaatcttctcatgagcaggctgcaaaagcaaaacacacaaattttcatcatcagtcaagagaatattgtgttattaaggtaagcaaggggggggcaaaaacaacttacttcaacgcatcttctaagcgcaaagtcgagaccccatccatgaaccagatcattctgcatcagaaacataaacaaactgatcaaaacaacaagcattattttgatggactaagactaggactatgtatctacagatcgacgaacctgaatcatatgccacacacatcgccatgcttctcgagaaaatacaggcgccattatttcaacaaacctgtgagagggaatttttttcagaaaactcagtactgacaatgactaaacactcttgagttgctctaaagagaacgtttcaaagagagacttacgcggcacatggaggtaaatgtgggtctttacaccatcctggtttctcttttgtatctctgttcaacagtaagtaacaacacatttcttaattcagaaccaaatttgaaagaaaggcaaagaagaatggttagagaaggagatcttacttatggacttcccggtcacctctcctctttgtcatttcccatgtgagtccattgttaggctctaagcctggttgagaaatctctaaaccatgcttcttaactaactcaatgtacctgaagttttaatagaattccatcacaaaatgtaaaatataagattgttctgctacttcagacaagtaataacttacttatccgcattgaaatgctccactccaagatcttcatcccatataaatatgtactcataagctgacacaacatcaggatgcaaaaacctcttcgcgtaccacctgccaaaaccagtagagaatttcgataaaaacatactcgacaaacatacttaataaccggtaaatgaccagatgactaaccattttgtttgctttcttgtactaatatgaatcgcgctcttcgaccactcaaattggtcccattcagttgtccggccatcataatggaagagcaaaatttggaaatcttcagaaaactgaagatatgacaagaaaacaaaaaatctgagtgtatccacaaagaatatataaaacaatacttgctaaaacacatgctgatattgcagaaccttcttaacaactccattaatatggttcctctgctcaaatccaactgtaaatgtcacaagatattttggcttcttcttcaaatcctgcaaaggttattgttttgacattaactattctaatggccttcagagataaaaccatatatattgagaaagtaaatatagaatgagaagtcaatacttcattaggttctccccataatctacgcaagtaaaaatcagttttcgccacaacgattcctggaggtagtagttctgcaccacgcgggttagttggaacatatatctgcaatcaaacatacagaaacgatacatttcatctgaaatgaggcactattctagaacataatcgaaaagctaacgaaagggaaccgaacaagaagtttattatatacctcaggaaactttcttgaaccgaaatcttcaggggatttgtcaccagatatggctacatcaagagatgatataaggcgcgagggtaagttaatctgcaggaatacgaaacaaaattcaacaggtgcaaaaatgaaagggacacataaaaggacctatgaaaaacaaaactcataccttaaacgaaagtgaaggtaatgtgataccaataaaagtcccaaacactatccccaaaatagtagtaataataacctttgcattttcattcgttcttcgaggagcaccactgcaaaactaaccactaagtagtaatcttcatattggaaaaaaaactcttttttttgtattacaatctatcagttaaggaaattatacctgcggtgcattgttcccatttagttagaaatatctccaaacactctagtcaacaaaattgagtcaccccaaattgtaaaaattcaatcttttttctgcagtagcttcaaaacgcaaacataatacttcagagaagatatatatcacagtgataactaattgtaatactgatagctaaaacaaggctacatcgaaaatcaaattcagcataaaagagatgaaatcgcaaataaatcttgaaaataaaaatgagattacttacaggccttacaggattattagatccggagacgccggtgaagaaagctgagagattagagctctcagaggagattctccgatctgtgagagcagagagtgataaagagtgtgacagagagaaagagagagagatttggtggagaggcctatttgcgtcgaatttttggaggttttttaaattcttaaaaggcccaaacttttttgattaattaatcaaaagataagctctattattaggacattacatacatttgttcctgtcttttttttattacacaactcatttattacattcttttggagccaacaagatttgaaaattaaaactggtttttcttgtttctaaatctcgtaatcagtcaaacttaactactttcatttgtgacaacaaaggaaatagaatcattaagaaatatgtgttgaataagaagaataagattactgtaaaggaaacatatgggctaagtttgggactgagcccatagatggtccatgactccatgttctgatgtacatgcagcaactccatgattgggcttagaattatatttttttgaaaaattgttacttggcttttttactgtaaattttgagggacaaaaataccttttaatatgagcaattttaattttacattagtataatacgaattgattaacaattttttttctatgcttcctgctttatagaattagtaaatcatttttcttacaaaaaggtttaattcactattttacagctttatagaattagtaaatcaactttttacaaaaggggttactagtcttgtttaatggtgtattacgttatactttggttttagtggtataaaatgggttcaagagacttgtaacttcaatctgaattgatcaaaactcaatttactataatcacaacaaaaaggaactctagagaacaagaattcaacaaagaaagaaagaaagaaagaaagaaaaactataaaattgagttgtttgttgggggacatattacaaaatccaaactaaaaaaaccaacatattttctgtcttttctttttttttcccgaataaaaatctaaaaaaaatacattaaacaacagaatcaactacacaaaaagaagaaagtcaatctgttttttccccggtttgcttggactaagttttacaatcaataaagagggtcccaatttggagagatcattcaattgggttgtcctaattaaggaaattaattagtcctttttcatcttgagatttcacaagtgggacttagccctatttgctccatctcccagcttttctttgaggctaccttctcatgccttggtacataatcctatttttttcaaatccacagaagttaaaaaaaaaaactatacagaaaatagtcaaacaagtaaagaaaaaagtgaaaaagcaacctcaagtttcttgacaagttctttagcagaaggagcagatacaatgatatgacgagcagttggtgaaatgaaaccttcttccactgctttgtctatgaatgataacaatgaattgtagtatccttccacattcaacagtcccaccttcacattcataacattaagaattattattggtaaaaaaaaaactaataacatggcatttaagaaactagtaatgacttaaattttcatttgacgaatttatcaatcatttacgattttcgtcacgatcgattaatcgttcgttatagattatttctaatgtgaacgtctaatttactaaaagaaaattagagttttagagtttactttggttaggacgtatgtgaaaaaaagatgtccataaaatagaactaaaataacgtgttacctaaaaaataatgtattctctttaggagattttctttcactatttgatggcaatagttatttttccttgttaattacctagtttagtctaagattacttcaagttattaggaatgtataatgtaatatatataaatagaaatggaagcaaaatgattactggtttatcatggatgcctagctgtgcccaagtgataacttcaagaagctcttcaagtgtcccatacccacctacataataacattcaacattataaattcccattttactaatcacattttgtataaaatctaatgattaaaatggtggataagaaaatgaaaaggaaccaaccaggtaaagcgataaaagcatcagagtgcttagccatttcagctttcctttggtgcatgtctgctactgccttcacttctcccactgtctctcctgttatctttatccacaatttacacaatattgtttgttatttttttattaccactcactctcaccacttgtgtcttctatatattccaaaacaaaaagacaaatctcttacacactcacaccacttgttttatggttttcttcctccaaagatgtgtgaatctaacaaaatggctcttaatgctactgttttggattcaacatgtaatatacaaatccatttttatcttatgcaatcatattttagcccattatgttgtgagaaaggatagaggtaatgatgatttagtctctcgaggtgttttccttacatttatcaccttgacccctttcgtagaaaggtaatcatattttggagcaacatgattggtggctttttatttttatttttcattagaaattaactacacatttcaaaagacagacaaaataattaaattatactcctaacaaaaaaataagataagggaaacatgaaaatatcaccggccaataaattggcctgttttgtctcaattgaaacacactctaatatgagacaaatgtgatatacgcgttttaaagataacatttatgaggttgatgttcttgttaaattatctaccaccaatttctttaaactctagaatttgtttttatgaaagtggtaagaaaaaaacaatagttcataaatattattctggagttatatttcggacgtacctctcttggcattagtgtcttggggataaccctgaagacagtaacaagacaaaaaaagttggttaaaaagtaatcgtcacaaatactacacgtatggcaaaattatccattttttgttaattactggagaacattgaaattttaagaaaaaaaaaaaaaagagaggtttaaacgaacccaatgacatggcgacctccattgaaaacagcttgagaaatcaaacccattaaaccaatgctccctccaccatagacaagatcgatatttctcgatacctacaaaaacaacatttggttttagtaatttttggtgttaattatagtggtcattgtcatagttaattgataaaaaggattacaattgtgtcgacaaaatagaaaaaaaaaaagcattacatcaaatagtagtggataaagatattgtagaaaaactataaagatggaaactccataattacattttctggtaaaagtacccacgaaagtacatgaaaaaaaaaagatggtaaaacaaaaataaagtatgaactttcccatcacaaattcaactaaaaaatacttttgaatttcatcctttttaagcgttagaactatgtttctaccactgaccacagtaagtacaaattgaagatgatatttcaaacaataatcatctaaagaagataatgggaaatgttttgatatgaattgctgactccactaactctaaatggcttaaaatactttagttatgacaagtcaaatgattaaacccatttcctagcaacttgtaaataatactacctttaattgggtcaacggaaaaaaataattattagagatccaacattttgatattcaggtatttacaagaagtcaataagtcaaaaagaaaatgataagaaaatatttttgtttcataacaaagaaatatttgtgcttcacactactcataaattattcaatacagaaatcaaaattggttaagttaactcttttatgttatttatgtggtttttgtatttttacggttttaaaatttactaccaagatgtgaaatcttaagtctttaaacaacaaaaacaaaagaatctaaggtctacgacatgagtcttcccaaaaacttggaactgctaattctcgattgttttcaatctggaaatggaaaaacagagcttttttctcttcttctatgttactcttaagctttgaaaaaaaatgaaaagactaattttctatagaaaacgagactttaagaaaaaaaaaaatatgaaagaaaacaagattctaaaagaaaaaggaagtgaaaatggaaattcaccagttcggttccgagttcgatagcagcatctttgtaactgactttattaccagcactacttccacaaaacacacatattctcttgaactttgattctatctccatctttctcttcacacaaagttttgttttaagataaaaaaagattgaaagatgaatctatctttctcgttgtgatgttggtatgaatgttctttgctcatatatatagaatattgggcggtggggtatatacctagctcatacgcttcctaatagtaatatcataaaaagaaacttttaaaataaataaatagtggctacatgagtttgacattcttttttttataacacgagtttgacattcttccataataaatagattagaaatggttaagaaaaaataaaacttagaatagaaattgtcttattccttaggttagttggagaccaataatatacaattacaatgtaccgaatgtcttgataaaaaggttcacattcattatatatcacattctatttaatattactccaaagtacttttgttgacacggtgtgtggatgcgtttttgttgtagaagttgccgactgatttccactaattaaaaatttaaattgtgatagcagagaacttagtacaaaacaatcaaaacgagcagaaaaatccggttttgatagcctacccgacttatcacctagccagtttaaagagaagagttggaaatgtctcgagtttgaggaccgaaaacgaagaagagactaaaataacctatgttggtttgactttaagatttaagatttaaggtaatccaaagaaattatggatatatcaagatcaataaatttttgcttaaaacaatttgagcaaataaaataagtatagataatagataacaatcaaactagaactaacaagacaaataagttaacaaactttgaatgtagatttcattgttttagtaatatgtaagaaaatagactatgcacttgatataaacacgattttttgggttcaataaattttacatttaatgaaaaatatatatttaaatatttttgaatatttgaaaatgccaaaacaaaatttttaggagagtgttgtttaaattataataactaaccaaaaatatttaatataattatatgagaaagaaaaataagaaaatgattattgtgtgtcaccgttttagaatatatataagccttcgcccaaaatatcttcaaaagaaaaaaaagaatgtgttagtgaatctaacaacaacaaatgaaatgtggtggttctgtcccaactacgacaaccgcatatctctattcatttgcttgaatatttattgtttgggttgatccaaaccaatcatgtttagccagacttcattgaaaaatgattgagttgatcgactgccctatattccgtacggaaacacaaaaataacatgagcctctatcacaattaacgcatatgttaccaattcatgtatactagaaataacctatggccttgcgcaaaataaaataatttttatctaagaaattaacttactagaacacactctacctctcttcttaaattgtattttgattgtattacttatcctttataattccattgcctgtctaggcttcaattccacatttggttcattttgagttgttattgtataatagcctaatgggtacgtaatttttagttgtaattagtttttgaaaataagaaaatcgtaccataaaaaaaaaaactcgatgacaaaccatatgggttctttttgggttaaaccagctttaaaacttttgttgaaatatgcaagtgttggagacttggagtaatattttgattgttttatttattctccaccaaccgtactaaacacactaacctaatttgtttcgtactaatcctatagattgtaatgttttatctactgcaatcatttagtactgttatattccccagaagttctcttaattttctcttttcggccacttaatgtcttaacgttgcaaaagtgacttataaatcccaagagatcagactatttggttaacgttacaaatttaatcttcattttaagagagtcgataggtgatgtatcatgtatggtccaaattaagggacaatccgaaaagccaaaaaaaagttaaacatgtgaaaaacatgatggtttaaattcatactttaaattgatgcgaacaactctctcttttatatataccgactattttaaattatttgtttttttgtcagaattattttgtataatatcccagttaataaaaaatcatccaattttaggttgaagtatatatgaaaatttcccacttcctcaatagtaccgactatccatcatatatatatttagcatattgttttggatcaatttaatttttcttagtatagcatcaattgtttatttatttatttcttaaaggtgttccctgctccctttaataaaaattcaaaacttttataaagtataaaaattataaggcgcgaggaattgggaaatcaaatatatgaaagttttgacaaaaatactgagattcacattcaccatgatttatgattcaccttaatattatttacacatagggcaacttaatacttgaaaattcgaacgtcggtgtacataacaataccattaagaggttaataaagtaacactgaaataaattacagagcacacacttattgtagtgattagtgatggtttgccttttctattttaggacaatttcaatatagatggacattccttaattgccaaagaaccaaagatataacgacacctatctcatacactaaccatttgtggcctccccattttaggaaagactggtctaccaccttgtgtccatcaaattcatttttagtagatacaacaaaggtccaagttcatataaataatagaatctgtctcgaatttatgtttatatgcatgtaaatatataattagtaaaactatagcgttgaatataacttgtctaaaactagtaaaatgctttaattaccgtcacatggttaggatatataacgagtcaatatatgaatatcatgattcatgaacaaatgttgaaatgtagtatatgtttatatgctacaaagcgaaatcaaagtgtcatcaagtcgctatattgaacataacttaaaagcaaacgttttaacgaaggattatgacgattgaataatagcatttagaaatgaaagttttatagttgatagttttacgaaaaattagagtctccttcattttatggcaatttagctactttgtcaatgtaattatgaatttatggttgaatttacgtacgtccttatttatcacaacattggcatggagataactagcgatcgatgataatttgtgtgccttgtccaatgtagcaatgtagtacatgaatttattttctttgtttaatggataaattctttttgtagtgattaccggctccacgacttgactgaacgatcgatttataaacaacaaactatttttttcgattatttattggactaaaaacctcttgactattaaaagaaacttatcctacttctgtagatacgttttcattatcataatgctcaccaaaatagggagaggaatacacgaaaaagaaaacgttgtgtgaccatattacttaaccgagacattgaccatctttttttcccctcttttatcgtacttttaatgctattattctacttgtattttagatttatcaatgaaaatgttgtttatgactatcgaaaaaaacttaattcatctacaacttaatcaatcaaactaaaactactccgttttagcccaagcaaaatggtgcagtggtaattggaccatgacctaggagaaagggataacatgactatagtgtgtctgagttcgatttccactacaaactaagccattttgtttggacaacttgaagcttctcgatttgagtctcaaataattaacttgtgggtaggtttgcagaaaactcctgccaaagagtctattcacgtccaggagtagacgagtagtggtccttagctccgactggtcggcaaccgaatatcctgtactaatctaaataaaaaaggaaaaaaaaactagtccgggtttggtatgattttcattattggagctgagccattccacgataattaatgtaaaacaaatgtcacaatatatgtacgaaactaagaatgcatgattgtgagaaaaaaggaataaacaaaactacaaaaaatgtaagaaacgtaatcacatggaggaagaaggagagggaggtacagagtacgtcgtaggggacccctattctatcttcgtagtgttcgacagagtcattgtcctcaatatgagttttattaagtgcttgtgagagttgtgacactatcttgtattgagcaaatcaagtttcaacattttacatgaattgttgctctcaatgttttataactttgacttttgttgcttcatatgtatgtacaacctttgacatctcaagttttcccaaagacacagttcagatacaggaaaatgatgtacttgtggtctagtggagttgagaattagatcattattcttttgcatgtggaggttgtgctgtaaaaggcagaattgattttttcttttgtttcctaaaatatatttgtttgatatttacgaatttccattgtttttttgggtacattggttattatatatcactaaattacgttggttgattaaataaaatcggcaaaataattgaatttgtactactttacttcatgcatcctctgctacaatgtctctgaccagtgaccattgacatttcctttcaacagtttattggtcagttatcacaaatcttctcgcactaatttactgatagtaggattttatgagtgagtacaattgataaacatataatttagatttgatgtttgcatttttttgaaagaaatgctaaatgaaacagtttataaatttaaaataaaaataaaaataaacattacgtaaagttattattaaatttgttcatctatttgcattttgtttcctaattcactcagggtttgaatgattgcgacggttggggcggacaaaaccgtcaacggaccagaccacttttatttaccattcatcaattatactccgtagtggtctgaaccaaaaaaaatagaagaaaacgtaaccgcatcggaccatctgcggactgtttttatatacaaataaatttggtccgcatcagtttattgtccacccaaaaatgagatggactaaaccgcagacaaattagacctctttgtctgctgcctccattcatagcctcattgccaacagtaatatattcgcgatcaaaatctcatgatgctttagtaaatacttagccatacgccaaagttttttttccactggttaaagctatgtaaaaactcaggaaatcctccaaccccgctgcacacagtacactcatcctaatttctacatgtaacctggtgaattcatcaacgtaacatattatctcttttaatcttgtaatgtttttcaaaattttaattatatatatgaaacaaagagtgagaaggatatataattttatatttctagagattatgtgacggaaacattaatcacaaatctacaacgtctacgataaatttagattatacaaatatctttctcactgctaaatgatgaatttgcaacgacttacttacctattaattagattatctccttagtagttaactacaccaaaaacagacattgtatctacttatatgaatgttgaacgtacaatgataagttgttccaacgatgggattcgaataaaacggaacatgtgtaagagaccatagagacagaagaagtggaaatcccgtgttaccatctctgtctttgctcttttgtctgaagtcaaatcactcatcgttaaattagttgcacacacacacacacacacacacaatgacacaacacttcatcatcaagataagtctctagatttttctattaatttaaaccaaaattttgtgaaattggtgggaatcccactacgatgccaccgaagcagtattattaagaactggtagggtgcaacgggcaaaataggccttaatccaaaatgttgtctctatttaaggttattttcactaagacatgttcccacatgaaacatctttttacatctctatgcaaatcacatcttgtccctcatttcctttggaacatcatccatcatcttcacttatgatcctccagcttttttttgacaaataatgataatttgcttccttaataattgtgtagctgactaagtttctgttattattgcactgtttatcaatctatattcgtttaaaattattggttactcatcctgcttaattagatagttgtaaatctatattagtgagttgttataaatataaatatatttgtgagctagtatgtcttcattatttttcgaaatctactatattattcctaattacttagaaagtaaaagaattatattgaaaacatcaagcttttcaatattgaattaattttctaaaagaggaggactatttacaaaactttatcattctatctcaaaatgaataattcgtgatacttttacactaaattatgatttgaataatttctaatcttgattattgttaaacaattgacgaagtacctaattacatgacctaatatttttattttaagtattttaacgagtgttgtcttttttaatggtcgtcttatccgaaatttagaaagatgattttctcacggaacaaaatgtaacaaggaaagttgtagctagcaacatcatagtgattgatcaacaaccaggttaagaaaagagccaatggtacatgaatttttctaataaaaggtatgacacacattcaatcacttaataatcgttagacaataaagtgaatggagagattaaagagacgtgttaaatgaaattaatagatatgtgtcattgtaagagacattttcacatctccatctacaacttctagttcactatctatcttttccttgtagatgtcaaaatctaatattaattttgaattggatcttatcctcatttttaagaaaagaattgatttttatttttctttctctaattcacttttgtgtcgtataaaaaaataacgtttgtaaggaaacgtatgttgaccaaaagactaatgatgatgtaagatgggtctctaaatccactgttatatttttgtgtaaagtcactaaccttatgcttttgtgggaattgaattctctctcaccatttaatttggatgcgctctagatggactagccaacttttccggtggatagttggagccaatgctccactccatattgactttatttttattttttaatcttatcctaacaaagtttttgacatattttctgattattttttcaactattaaaaacttggtaatgaatttctgtttttttcttttctggtcatgttatatgagttatgttgtttatttaattgtgttaaaacattgcaaatttctatgtaaatttaaatgtatatgataactaatgaccatttctgttctgcattatttttcatgattgattgaattctttttaactaaattcaaatgatatatatatatatatatatatatatataaagtatctaaatatattttactttaaatatcttttattttgaacagtatatagattatatattcttatttccatggaaagaataagggagggaatattccaatgttcatatacaaaatgaaaaaaatatcaaagccacctctgctcttagcccacgtctcttctctaagtttgtggacactgtctcaactatccacatctgttacactcatcatttttggttattaatgcggtcctcaaagcaagagtcacattcacaatctgcactatcacatattatcttttctcttattcttttaccacacaatacaaccaaagtttcacgttttgttttgctctttttcggttaaaattactttactaaacaaaattttgatctttaggtttggttgttgattcgaatacggggaaaacaccttctgaaatggtagacactttcattgtctcaagttaaagccgagccgatggacggaatagaagggttgaaacttgaaacagtcatgtgccgacattgttctgatctgaaatccgcactcttagtgaacactaaggagacgaggagagtagcaaacaagtcatgactaaagtaatgaaagagtgatcagaaatgattctaagccctattaatattcccaaatgagaggataagttaaataagtcagatgcagtcaatacatcttcaacattgggtttgttatattagatattaaaagttttacaacttaatattagatgaaatgaactacacatcttcattgtcttttggcacttctatgttgctctcttcggcgaccaatgaattcgactcaacacaagttccttcaacagtagcaacagttgtaccatcggattcaccgtcaagcctgtctgatggattctcggcatctttttcctccgtcttcgggagggatgaatttgaatctgtgtcttcagtaacaacggtttctaagtgaacgtccatacctcccactgcatctggggatggcggaaatttaacttcaggttgtgatgaacatccgggagagacatcaactaactcacattcggcagtttcaatgtgatctttctcctcaatgttagtttgctcaactgtaagagacactgagggctcgacttcagctaattggccatcagcattttcgtcctccgtcattgggagagatgaagggagttctgaaccttcagtaaccaccgtttcagagttcattgctgcctctaagtgaatgtgcataccttcctcgggctctgcggatgacgataattgaatttgaggttctgttgaacatccggaagggacattaattaaatcacatccacctgtttcaatttgatcttgatcctcaatattcgtttgcacaactataagagaaaatgagggatctatatcagctaattgaatctcggtaactacagtttcagatttctttgtttcctctaagtgcatgtgtgtaccttccattggctctgcggatggcggtaattgaacttgaggttctgacgaacatccggtagaatcatcaactaacccacatccagtagtttcaacttgttcttgatccttaatgttcttttccacaactgtaggagacgtaaagggctcagtgtcagctaattggctctcagcatttccttcctctgtcactgggagagatgaagggaatgctgtaccttcgccaaccacaaccatgctttcagatttctctgtttcctttaagtgaacgtgtatatctccatctggctctgcggagggcggtaaatgaacttgtggttctgacgaacatccagtcgagactaactcacatccagcagttttaacttgatcttgatcttgagcctcaatgttcttttccacaactgaaggagacgatgagggctcaatattagctaattggctatcagcattttcttcctccgtcaatgggagtgtagcgagttctgtaccttcagaaatcactggttctgcggatggcggcagttgaagttgaggttctgacgaacattcggtcaagacatcaactagaccacatccaccagttgtaacttgatcttgatcttgagcttcaatgttcttttccatagttgtaggtgacgatgaaggcacaacatcagcgagatgggtcttggcattatctaccccggtcattagatgggaagaattatctaccccggtcattaggagggaagaagggaattctgtaccttcagcaaccactggctctgcggacggcggtaattgaacttgtggttctgttgaacatccggtagagacaacaacaaattcacatccagcagtttcaacttgatcttcaatgttcttttgcacagctgtaagagacgatgatggctcggtgtcagctaattggctcttggcattttcttcctccgtcttcgggagagatgaagagaagtcagtaccttcggcaactatttctgatttgcttgcccctaaatgaacgtgcatatctcccactggctctgaagatggcggtaattgaacttgaggttctgttgaacattcggcagagacatcaactaactcagatccagcagtttcaacgtgactttgatccttatcctcaatattcttttgcacagctgaaatagacagtgagggctcaatatcagctaattggtgtaaagacacatcaggatttttgaattcttcagtatccatttgatcaaccaaaatggatggcccgggctggatatcagctaattggtgtaaagacacatcagcactctcggtaccaggttctttggatttttcagtatccatttgatcaaccaaaatggatggcccgggctggatatcagctaattggtgtaaagacacatcagcactctcggtaccaggttctttggatttttcagtatccatttgatcaaccaaaatggatggcccgggctggatatcagctaattggtgtaaagacacatcagcactctcggtaccaggttctttggattcttcaatatccatttgatcaaccaaattggatggctcggcctggatatcagctaattggtgtaaagacacatcagcactctcgataccaggttctttggattcttcaatatccttttgatcaaccaaaatggattgcgggggctggatatcagctgatctattttccagtatagcagagctgatctctacttgagattccacagaccctatgcaaacttgatctcttgaatccctttgttcaactacttctgacggttcacagtgtgataagctatttctgttctcatcctcaggctgggtagaagatgaaggctgacatgtcttacctgaagttatgccaatatcaatagaggtattgttctgcatggtatccattttctcacagttgccatcgtctggttgtcctggtacatcgtcgggcaaaatacttggagattgaatttcctcagactgggaaacaacaacgtctggcactactccatgaggtgatgcaggtacatccacaatctcttgcaaattttcaggcactatcccaccaactgggggaatgtcagtttgatcctgagacactttcaaatcatgtgatacatctgggacctgctcagatgaaatattcgttttttcgtcattagacatgctttctagttgtcctgccacatcgtccggtaagatacttggagacagatgtccctcagactggaaaatcacaatgtttggcgctgctccgtgaggtgatgcaggtacatccacattctcttgtacgtgttcagggtctatcccaccaactaggggaatgtctgtttgatcctgtgatacatttaaatcatgtgatgcatccgggacctgcacagatgaaatattcattttgacgccatcagacatattttctgatacctcatttcccctatcaataccacctgaatctgtacgagcatgtgtctctgattcaaaccccttctgttccatcacttccattgttggacaggaaacaagagactctccatgtaaatcatctcctttactgtcttttgtgttctcaaaaggcgcatggagaacagcatcatcactgggcatatgggattgaagacttttctctttctcctcactctcaactgaacaacccactagaagtttggcatcatcgatatcctccatatgtgtgtcagcagtcccatctttaggcctatcaaaattcgaaacagattcttcaggattttgttctgtatcagcatcatcaccaggtatgtgggattgaagagttttctctttctcctcactctcaactgaacaacccactagaactttggcctcatccgtatcctccatctgtgtgttagcattaccaactttaggcctattaacaccttgaactgaaacagattcttcaggattttgttctgtatcagcatcatcaccgggtatatgggattgaagagttttctctttctcctcactcgcaactgaacaacccactagaagtttggcatcattggtatcctccatctgtgtgtcagtagtaccaactttcggcctatcaacaccttgaacggaaacagattcttcaggatttttttctgtatcagcatcatcaccgggtatatgggattgaagagttttctctttttcctcactctcaactgaacaacccattagaagtttcgcctcatccgtatcctccatctgtgtgtaagcagaaccaactttaggcctttgatccgaaacagattcttcaggatcttgttctgtatcagcatcatcaccgggtatgagggattgaagagttttctctttttcctcactctcaactgaacaacccactagaagtttggcatcattggtatcctccatctgtgtatcagcagtaccaactttaggcctaccaacaccttgaacaaaaacagattcttcaggatcttgttctatatcagcagatttagagataggatcataatctttatcgtcaagggacatagcattctcattgcttgtaactaaaaccaatggctgcaagtcaatgctactgtgacccttttgtccagcatttggcagttcatcaggctccagcatagacgattgaatttcaacagaatgttttgcctcatcttctttcaccgtctgatttgcaacatcaacagattttccatccacatgtggaacttcatctgttctactggcttgaagttcctcagaatttgtctcaatcttggagttaacattcgtttgctcttccgaacttaggaggatagcttctcttttatcaccattgagagttttaacttcatcttgaaaagaaatatttttttccaacttgtcagtaggtagaggttccgcagttgtcgacgcagatgcagtaggctcagatcgaacataactcaatgaagatgccgtttcttctgccaggtgacatgtttcaccatcactagcaggtgtggtttcaccttcttgagacagtttttctcccagaagctgatctgcagtgcacttttccaaagacgatttagcagtcaaagtatttcccaaagagagttgtattacagaagaatctacgtcaccacccggaattttgacaagctcattttcagcagcaaccttagacgacccaatgtcaacatctttgtttgcaactgatcctgaagttgtcagatcaccaggaacaggatgaggaatatctgataccagtttatctgccttgctcaggttatataaagcttcttgattcttaagaccagaagaatcctctgccttgtgggtctcaactgtgtgcaaattcatctcaccaggggattgtgcgtcaggcacatttgttctcgttgttgcagaaggctctccaactttatgttttaatagggaagtctctgaaaagatctctttcatgactcgagcaacatcagttacatcagcagtttgtttcctagcagaaccaccagtaccagaggtgtctcttctaatttcctgactcaaactaccagaagagtgaatatcgggtgcaactgactggctgaagtggggttgttctttggcaacagcatcaaacttagctttggtgcctgataaattaccaaccttgacctctatttgtggtgttaatcctgtactccttgcagaagaggcatcggttgcaggtaaaggttggccacgcctctttccttggcgtttaggagtttctcctctgcttggcaaattgcggactcgcctcttagcaggcaaggctgctggaagagaaggaacattggcttcttgagctgcaaagatgacatgtacaatacggaaaagatttagaaatcagagcagttttaagcaagttacgatgcttcatagatttataccttcaaccgtagaaccgacaggttgagaactcattggcagagtagcatcagaaggttgagaactcattggcagagtagcatcagaaggtgcagttgtcacaccttgcaaagctgtatatgttcgaccctcagaaggacttttggatccatcacaaacagaagagacggcattctgattttgcactgggccaccacctaccaaaataacatggcattaagattcccatcagcattatgttctccatcatcctcatgcaagtcataactacacatcctagatgaatatgaaaactacatagtgatgtttgatttatttacccaacaaagtggagctagtggagactggcaagtcaagtggctgtttattaggccctggatgctgggagctcacaccttggatcaaaggcctcttctttacagcaaatgcttttctttccgatgaattttcaagtacatttagcgtctgaacatgggatcccgaatcaaaaccaggtggtgcatctaggtccttatctgctgctttgtctgatcggagtgcagtagtggcagaatgcacgggagatacttggtcaggattcgaagtacttccttcattagctttagggactcttgaaacaatctcagatgcagaacgaggaagagcaaattttgtggcttctgcatcacttgcaagagatgtagcggtttcagttctctgagtaatagaactgttggaaccatgcaatacaccttcaactcttcttccccttcctgctccacgccccctgcttcttcccctacctcggcctcttattggcgtaggagcaggagatgctggcaatgattgaaaaccaggaggaccagataaatcaggcgaagtcagggcaagagacgaagtaggatgagaagcggcttctagccttttatctgaactaacaaaatcaagaccagttgctgccgatgatatagcattccctgtcgcctgtgtcctgcttacagctgataatgataccggagtcaaggctttatcagttctctttggcctaccacgaccacgttttataggttgtgtttcttctttcagtgtatgtgactgtggccttacaggttccattggttgtacagtaattgcctgtgtcggagatgtagggagtagtgtgtcactagaattttcaaccggaatatttgatgtatcattcgccaagctcctttcacttccttcgcccttgccttggggtgaatcaggtgactcagtctgacacagcttctcaaactcctcctcagttaatttctcttcataagatcgaacctaatgaagttgcaatatttgtcattctatagtaataagtgaaaatactgtatgcagtatcatattacaaagagaaaagtcaacaaacctctcttgctcgtttccctcttccatattggtgagtatctaggcctcccatcgaaccatccttccgcttcatgccaacagttgattcttttgcaaccatggggacatcatttagtttcattgtttcatatagtagttttaaatcatcttcagtaacaagccgagagggtatagatggtatgtgggcaaaactatctgaccctggcccatgtaccaaggtattccatgtttcctgcacggccatatctttttcaaataaacatcataaaacgatataacccgaaaataaagttaataagaacaagcataccatctcattttctttcctttgtttgtcgatggactcaaagatatcaatctctgactccctagaaagataacaaaaatgtcagatctgcaagaaagttaaaagaaaatcgagatgcatggaaatgtaaaaagattgtcatctaagaattaaaaaggaagccaagctatcaattaacacagaacacatgaaaaaacagtagatgctatgaaaatagaaaataatatagaagacaaatatttacagttagaaagtaaaatactttgtacaaattgttggcagtaatcttggtagaatttctagatttatcatagtgcaaaggaaccaaactatcaggattattttaaaaccacgtatgcataggctgttgtaaaattaaaatttgtgcaagtaaattattctgtataaaaaacgatgcaaaagagtattaaccttcgagctataagatcatttaaggcatcatcgtccaatactggagcatcctcctctttctttgattcacgcaaaagggattccaaatattccttacgatcttcagcactgttacaaagtaagaatttttttagagaattggtagttgaaacttcttgaagcataaaagggatgtctctcgattcacctcgtgttattgtcaaaaaagccagcggttatactctggttagcaactccaagtttgtgctcagctgaagctctgacttgctcctcaacagaattcaccttaggatataattaaggacgaaagacaaacaaacagttcagacagcttaattatataataacgcgtcaattgaaagggaaaaagccaagaaacaattagtatctcccaagagtactgcactgttctatttgcctcataagtcatgttgaacagccatagatttaggacagcaacactacattatgtagcccaatgatgaaacaacataaactaaaaacaccagggtaaaagttacaaccaatcacaaatcaacccatttattcagatgtttaatttccttgagcacaataaataaaaaactaaccgtttcaaaacgaagaacaagcacatcttttttctggccaatcctgtgagccctagcttgagcttgcagatcaacctgaaatgtataataaatgctgcttcaagtccggcctgatgtccacagtattcaactataacttaacatatggaaatgctaggtctaacctgaggattccagtcagtgtcgaatagtatcacagtatcagcagcttgaagattaactcctactccaccagcccgaatgctgaaattccatgaatgattcagcaatcacatacaaatacatatcagtcgtactgaacgcccaaaagagtttacaacttgtagtatttaggaacataactaaatctattaaaaatgaacatgaatcatcccgatagagattagaactacagaaagccagccatgatatatgatacatcacctcaacagaaatatgaaaaatggggaacccgacttgttgaaaccatcaataagagcaccacgatcacccccagatgtctgcccgtccagcctaaggtatttgtacccctttaaggtgaggtaatcctccattacatcaagaagccttgtcattgtggaaaagaaaagaacctgtgggaattcatgcataccataaataaaagtaacaaccatttataagcttcagtattaaatttaaggtaaaaatgcaaaaaagttacaaattctaatatatatgtgcgtttcacaaataacagaaaatcttatagttgaggacttgatgttttgcgtgaagtgatatagaagcaagtaagcaaccaaataaagggaaaaaaaacagtaatgcttcatccaatcaaaacataatttcaaaaacttttcgtaatagacactttaatcctccagaggcgaacgcaatgcaaggtactctagcacactacttgaaaacacttagcccaacttcaataataagctttcgtctttaagagcattgaatcatcacaactatcctattaccatgagggaaaagagagaaatcattacccgatggtctgttgctttgagtttaggcaacatccgatccaacatctcaagctttccacacagtcttacaattggaggcaggaaatgcttaggaattatgttattgacctaataaaagtgaaatgcccttcattagggttgtccatagtgcgctaaccagtgcttcattgcatttacaataacacttccagataaatgaaaaccattacctcctctgaatgcagttggctaagatatggatgattgcaaatattccgaagctccattactgagttgtgcactgcacgagactgtaaacaaaagaaaataactaaaaaaataactcaacattatcgcaaaactaccaacacctagagcataaaacaacaccttcgcatttccaatcgaacccaaattatcctcaaccctcttcatcaacagcttctgataagcagaagcctcacagcgtatcaatctctctatcttttcgggaagctcattttcaacctaccaaaataaaatagtatgttaaataaaacttaaagtaactgagataattgcattggaaaatatccttccatatctctaacatattaaagtaacacaaaggagacattctgttatgaaccttatgtttcagccgacgcagaacaaatggtcgaagaacttggtgaagtcgattgatgatcagtagattctcctcttctgatagcaatgcctagtcagatggcaaccataagggtgcagttaaagccagaatgtcttatgaagtgtatactgtctactattttaatatcaaatacagtcaatgctacctcctcggcagaactttctccattactttggaatggtttgttgaaccactgtgaaaagtcttctgacgagttgaatatattaggcagcaggaaattaagcagtgcccacaattcttctaggttgttctataagagatgtaaatgatgagattgtgggcaatgcgaacagcagaaaatagcaacaaacatgatggggaaagagtatgcgtcaatatcaagatgaggacagatggagaaagaaagaaacagtacctgcaatggggtcccagttaacagaagtcggtgggagctaacataatgtttcaggtctgcatttaacttgcaggatgcattctttatgcgatgtccttcgtcaataataatatagtgccagtgaatcttgcttaatttaggcctatcatgcttgttcattagatactcatatgtcgtcagaaggacattgaacttctgatgaacaatttgctcccttcaatgaaaaaggagacattgaaccttaaaatctgagatataaaggacaataaaaacaaaatttgcgtctctttacttgaatagtttgcgcctttcgtcaggagtcccacagtaaacaattttatgaattgatggggcccagaagttaatttctgactgccaaccaggcagaaccgaagatgggacaacaaccaagaagggacctctatcattttttgtctccatcagatagcaaatcaaagaaataacctacaaaatacgaaaaggaaaaacaaaaaactttataacttatgaaacaaaggcatcttataagaaaatctgacatgtgtgcctatatcccaaatgggatggcattaaatacctgaacagttttcccgagacccatctcatcagctaaaatgccatttaagtgattgttgtacagtgaaactagccaccttaagccgttcatttggtacctaaaatgtcaggttttgtagctgtaaacatcccacgaaaaactattaccaaaaggtctcaaatgtataggggcatggtctacttactctcttaactttccacccactagggacgatggctgctcgttaatattttcttttatactgcaaaaaaaaaaagaaaaaaaaaaggaaaaatctagtgaatagatgaatgaggaataatatccacatatgactatttacaaacaacataaccaccttttcgagaagaaaaaaaatggtaagaaaggtgacaactcacatacgaaacagaaagttaaaacgttataatgtcattaagggtaatgtttagactgtaactatagaatgcagaatattacctgtgagccatcaagtagtatttttcgttgctttccaggtaatgctgtatagtatgtatcataaccatgagaaacagatggaagaaagcttacccaaaaaaaaaaaaaggaataacctgagatataacttgcctttgcttggtcgctctcatcttcattttcaatcaaagtttcatcgtcggtagcatttgacgtacgcgtttcatctgcctcattctcaaatcgactggtcaacaatttagcctcttttaacttggatccaagtttctgaaggtacttttcagtctctttgagtagttgctttactcgatctgacttggcatcctacatattcagcaacattcatatacacaccagtatcaaaggagcaatataaaccaaaaacttccatagtcagttccgagaccaaacctgcaccattcggagataaccctccacatcatttatctttaacaaattaatcttctcacgttgaattttgtcaatcttctcacggtgaagtcgttcctttcttttgtggaactcctttgcatatctattgaaacccttcaacctttctctcctaactttaaacaaatcctctagtttttccctaaagccaggttttcaaacaaggattaagtacgaagcagtataaaaaatatcgtctactattcgatgcacctaataagaagaatgaattaggtcagaaaactaattgcacatacttgtgaacttctaaccctccaaagaactccttctgtctctcccgaattcttcgttgtctctcttccttcatcttctgctcatacttttcaagctgcttaattctccggccatgcttatgtttcttatatgactttagatgctcaacatcagttgcaataggtttgaagaagttgtaaacgaactcactgattcaacaagtcaacaaaacaatagcagctgagaggtgatacaacaggttgaatatgtggatgcatatattttacacatataacaaaatagtttgcatcctccgtagtttaacaaagacagaatatctagttatatcaataccccagctcgacttagcatataatagatataagaaggcgaaacatctccttcctaatatttcttaagcaaataacgtacagctacaaaaacaaaatatctagttgcatccgagatataataaggcgaaacatctccttcctgatattttttaagcaaataacatacacccacctcctcaatcgccgttgtagatttaacagctgaagctttttcagttctattacactcttggtctttgcagatatatcatcagacaaactcacagattcctgcagattaggggtacatgaatcagtatccagatccagaatatatagtaatcactaagaacctaataaagtaaggacacaagtacagctagttccttagtgtttctgcaaatgtgaagtacaactagttcttcagtataacgtcaaatgtgaaggtcatttcaaaaacattaccctaaggccaaaacagctaacttcgcagttatttacaatatgaaaatcgaaaagaagaaccccactacaggaagttgttttttagtgaattttgtaaactgagcaaataagtgttccttaatggaagacgaatacataaaagaggttacaaatgcttgcctaaattccaagtacaacttgccattattttatctcactgagatcaaatttaatatattagcttgatcaaaattgattcctgggatcagtctgacaggttacagtgggtagagctgaagatggaatagctaaacaatttactcaatcacaatgtcaggcacttctatatccaaaatcggatacttaaatatgatcattgatctgttccaataacaagatcaagaacacggaaaagtaagaaccaccacaaacaacaagcaacagcataaaacgttgacaccaggaaaaatcaatcactcgtgaaacaaaaggtaacaccaatgaaagaaaaggctagagaaagaccttcaactcattgaaccgtgaaccaattgcctggtcggctttctgctgtttaagggaccaactacgatcaaccaatagtctcttattctgtcgacccataatccatttctgtgacatggtgtacttaggcgacggttgcaaattaccttcctcttcatctgctatgtgccatatatccatattcgaagagttatcaatcaaattagttaacaatactacactccaaaagggaaagacccatcagttaaaacaatcccatctaagatagtcactaaccagaagaatgaaattcgtcgagttgaacagcagaagttgagaggtcattagttttgattactccagtccaccccaccatctctgatggtgtgtttttggtcaaaccaggagaaaacgttagttgagaatgactaacagcaacctgagtttgtgcttgagagctgggaattctagatgctagaagcttttgcccgtcagaaaatacagtatttgcgaaacttttttcccctagtcttgatctctcagtttctttggatgagaagtccatttcatccaatcttccagtgggattgtctgttcttgacaacagtgcagagacgtcaggaatgccacccagatcactggacgtatgtgttctccctttcggatcaaacaattctccgcggaaaccatctgtaatgaagaccaattatgatccaagggaaagcatgtaaaaagtggattcgaaagtaacttcagtgagcaccaacattaccttcttcgcggaaagtatttcgaagggcaatctctacgtgaagtttcttcggtaccaaaccatttctacgagatgaaaatcaaccagaaatttttagagttacaattgccgcaccaaaaggagtatacagaggctaggagactgtaaggtacctaagagctagaaacacaaggcactgggctctgagctgcttcagttgttgctctctaaaaggtgaacctgaaggcaggaatccctctcctgcaacattatttccaggttctttatgaattgcaggcctgattgctgtggcttcactgctctgccagccacactgccatagaaaataagatcccacatatagaggggatgagttccaacgaggtatcttggtatgaaataaaagaggaaaggacattttgcagagcctaagtcagactatatgcaagtaagattcaatacatcatatagaaggcaaagttttaatcaaatcacgtttttgaaaaagtgaatttagtggcatctaagttttttaggttaaaaaacaaagaaaatcaccacgggaaatgcaagcatttttttcatatttccaatacagaaaacgaaaatagataagaaaataatacttctaaggagagacaaatgtttcggagaataagccaccatgtgccagcatatatctctttatacattcttaagaagttattgtgcatcagatacgtgtagcacaaagtcccaaaatatttgaaattggcagagtcagggaggctcaaaatgatttcataaacctaatgttatgtacacaatatgtatataatctggatggattcgggaaacttagtgttatgtacctgtggagtcgtgaatgcatctgaggacaacccaacatgcaaattcctaatgtcacctgaggtttaatggcaacaattgtagggtgcttcttatattctagattaaaaaggatatgctttgttctgtaagaaacaatgttgaagcaaatatccctacctgaattaccgggcatttctattttgcttacttctccagtttgatcatcaatcttgtggctatcaaatatttgagagttatccatattctggtcccatgaaagtgatgattcacctctctttctctttccactcgacttgacatctctttgattcattgtctcactacgattgtgaggttgagaaattccagacgtagaatccaagttggatggactctcacgatcaaatgatctgttactttgagttccagacccttggtaaaaggtttgtgacgcactgtttgatccaccaagctgcctaccagaagtgaatgcatcgtattttgtcatctcattttcaactagagttgctttaccctcattgctaactccaaccgcttgggaagaccctgtattccacattgatgcaagaagcttaagataataaataaataaataaaaaaaacaattgaaacactcaactgaaacaaaggagagaggatataccagccaaatgtgcagacccagaatcttccgtttgggtaccaccaggatgaggaagacacgaggacttcaaagcttcaatgtcaagaccgtgttgattgactacagtgtccatggccctgggagttttagaaagactttatcagtaaaacaaaagtgataaatctttgaaagcatgagaaacagcttgacgctgaaagacccagaataactagattctaaagtcttgagttagataaaggctaaagcaactgattcagtaagaagcagcccccacgtcctcacagcgtaagaagattatatcatctcaacctaatcagtaattcattaacaaataaccagcgacgatatataaggaaaacaatacctagatatgacttgatagggcattgtgttttcctttccactggttttcatgtgctgcaatatctagagtaatcgaaagaataaacaaagttaaagcacaggaataaagctcaaaattacaaaataaaacatacactgagtggtgaagccacattaccacataaagtttagttgctagctttgcaggttcatctttagaatcttgaataagtttatgcagaaacttagctgcttccaactcaatattatgcgaagaagacgtcatcttaacttaaattacaccatcacataagaattccctgcatcaccacaagcatgcagatattgattacacaattcagaataaaacaagactaattccaaccaatgtgcccaaaaaaaaaaactaaactaaactctagagtccatactccataccaaacaaataaaagaaaatagcccaagagcaagtaaatcataaaggaggaaaatttatgtacctaaaagcaaaactaaagcgagaagaacctaacaaaaaaaaaaaactcagaggtccacaattcatgtgataaatccacggatacatacaaaattgtaaaattggctgatggagctaaaaaattccccaaatcgcaaggcaaaggagaagaattcgcgagttactctagttaatgcaactcacaaaaccctaaatagctaaataacgatccatcagtgtagaaggagacgaagaagaacaagaagaaagagagagggagctttacaaattagagatccggctcgagaagacgaagcagaagtgaaatttcaggtgagaaacgttgagagctgacaagtgaagaagctatgcgtcgtctctgcgaaatgactctccaaatgaagaaatgtataaaacttatttcagacattaatcaagagttctaaacgagaccccttaatgggccttgacccattaccataaagcccaaattgaaaaagataagttatatcactaaaagagggcgtgaagagatggattgatagacacggaaaagagagagagattttgggagattcgattcgaagatgttcgatcttccaattgatatggaggaggaggtgctctctagggttccggtgaaatctctggggaaactgcgattgacctgcaaaaagtggaacactataacgaaaagtgagagctttttaaagaagaaacagaggaatggaattgaggtggtgatgatgatggactatagagtttccttgatgagcgtagatctactctctccgtctatagatcctataggtaatctcaatgcagatggaatcaaaatatctaaaatctttcactgccaagggtttattcttatgcatcaacaaggacagagacaaagactcttctagggttgttgtttggaacccttatttgggacaaacaaggtatatcgaattacctagaaattctatctaccacaagtgcgtgaagtacgctctcggatacgagaaaaagaatcacaaaatcttgagattcgtgaatgagtacttggagaccagtagggaccgaattcgtgagcttcagatttacagtttatactccaattcatgggaggtcattgatgatttcactccagactggtatattttgtacaaacacagtggcgtgtctctaaagggaaacacttactggtatgccctagaagagatcccatttcatggtctaccatcactagatcaccctgattttctactatcctttgatttcaagatttgaaccgcgtctgcctctgcctttccgagccgtatttggagatactgtgacgcttgctagtgttagagaagagcagcttgcggtgctgtttcaccgggcatccgtcgtcgagatatggattactaataagattgagcctaatgcagtgtcgtggagcaacttgttatttgctgttgatatgaaaccagtcgctggtttttggtttcctaatgtcggtaggagtttcttcgttgacgaggagaagaaggtcgcggttgttcttgataaagagataatagacaaatgtcaccttcccgctcgcaatattgcttacatcattggaaataatggaatcttgagtaaagtggatcttggcgaatctagagacaagttttgttacccacttgtgtgctcttatgttccaagctcagtgcaaatcccaaacacaccctaatctcttaattttgttttgtggtgtttacttatctcagttttagagtatctcttactatataagaggttccaatgtaatctttccggtcccaattaagatgaatgagaatgaatttgttttctttttctctcttaacaaccttttcttgattcgttattcctctaatagtaagactggattcgtgaaaaaaatgtcgttgtttgttgtttaagcatgtgatctcaattgctatgatcttagaatattatcatttgacatttagaagcgatggaaacaaagtaatatataagcatcaatcagaatcggtgaatataaatcaaacagcaaaatatataactatttttatttcataacattacaacaagccacatgaaaaataataatttgcaaaccatacaaagaaagaacgatatcagaatgaaaacaaaagaatataattcaaacaaagtttgatggtcctcccaagattcatcatttaccaataatcttttctccttggttcccatgaaccgacataactacctgctgcgtcaagagcatctaactgtagttgatgtattatcgccatctctctcatctctttttcagcctccattaatgactttatccttgaagtcgataatgagcttgattctccttcttcttctcctcctttttttggcccattgtcttcatttgtcgtgcatgaatgaacatgtgtcccatagtcacattctttgcagtaatacacccaaagattctccgacacatctacttcgcaaacatcacatatgaacaccacaccgtccttacgacctttgcatggtgtgttgtaaagtagagtgagtgggtgttcgtgatcttcacgcttcacgttctcggggacaaacgcacatcccacgtgaacatggtatttgcactctgagcaatggtaagtgaaagcagatccatactcaccgcacgcatcgcacgtgtaagtggataggccattcggtggagaatggagcaaggtcaaagggtgatttgtgtgagacttgtgatggatctcaccgggaaggtcgaaacatgacttgtgcaagaagtaatcgcactctgactttgtacacttgaaagcttgcccaattagatcatgttcgcatccggagcaaatgatctcatcttcttctttggagttgaagacccgcaacggatgattgtgactcgggtgtctcactgatggacggttagtttttcctgaacccatattgttcttgatgggattttgaggctttgagggagaattgcaaactataattatatataccaaaaactgaggctattgaccaagttgtagcttagatacatttgggaaactatttaactaacatagtattagtttataaaagagagttgactttgacatggagaaacatatattgtaattaacatcaaattttatattgttagcaacataggtattatatgtagggttctactaggtcaaaaatcaaaatctctcatactcaatgcttatcttctgcatatatactccattgactagactaggtacgggttaatgcggctgacgtgaccaaggaactttgtgggggataattctatacgtttaggaaggaataattcaaagttaaggaaattcttgtaattagtagtcatgaatatagaagttggactttgagtacttattacgttttaagaggtaaatgcaagtgctcagttccatgacagtattttaatttattgacgttttacggtagcttgtagcatgttagaaaatgacgtgtatgtaaacttaaactagtactgtaaattgcaggttaagtatggacagaacttgactaataagatgtccaaatctatgtgccttttagggccgttatgtgactttccgagttgatgatatatgacctttgggtttgattatgactttttgggtcggattgtgaccttttgaagacagttatgacatacatggtcagattgagatcttcatggtcgaccaaggtaaaatagtaaaactaatgtagaaataaaaatcgcttgttgatatattgaagtataggttgaattgaattgttcgttgacattgattttacatatgagtagatatgatgcccattctccgtatatgtacaacattcgttattcatatttttcttatgatgcaagtgaagagtagttgtttgaattagtccattcaagactataataatagtataaactaaaatattaatttcatatagatcaataattaaagaaagtttcgtaatatgttatttgtttaacttacaaaaaatatatttttttttttttcaaaattctcaaagccccctcataattaattacatgtaagaattttgttttaacatttttctgtttcattccatactatatataggagataaaagagctactaaaatagttatatcgttactcattcattttcattcactagaaaaatctggctctactggtttttgaatcgaagacatcataccagaatccgaaccactacgcgtatatttcccaccattcactgctagcctagccgtcgcagcctcaaacctatagtgaaactcttcttttgccctcagctcagtcttgtacttcctcttcctgtgccgtctccaagcagcttgtataaaacaagccgcccaagtcctccattgatgcgaataaaaccgaaacttatgtctcaattgcttagtatgtagtcttctaaactgtgaagccacaaattgcaaatcttcagctttcaatgcaaaggcttcaacttcacaaatggctttaacggtgcgtgtggaagacggtaagatcacaacgggacgaggatctagtgcccatgtaagcaactcttccccgcagaaatcccctggtcctatgagacaagagttaaagaaccctgttctgcctccattggttgtgtaggaatctaaatggcctctaatgatgaagagcatttcgttaaccgggtcgccttctcttacaagaaacgttccttccgtgcataatgccggttttagtctctcgcagatcgcgtcaagcattctttcgtccatttgatcgaacaatggtacctatttcaaagaactcttagtaaaagatttcatcaagtaggtatatcaagaattgataaaaacacaaaagagaggcttactcggcgaacaagatcgaaacagagatgtcgttttatgtctcttcgaagatcaagaggaagacttatcaataaagcttcttcatcgactcctcgtgtagctagccacttgtattgatcatattttctaacggcttgtcttagctctggtggaagttgtctatgatgcatccattgttctgtatctgtccttcttatcctccactcttcaagtctcattgttgttgactgtaaataagtctgcatatttccaataagcaatgcaaacagaacaagcccgagagttgctatgatgatggcgaaaaggatttcgccagcgtaagtgctcgtggcgaggttttgtcccaaagagctaaagaatatataaaaacatgttatggataacctaatggagttaaatctgcaaagaactgtttaattcacctgaggttcttcaagccccaccatagacagtaaaagtacttgtttataaactttgatgaagtaacagttgatgttactgcatctccgaatataccaaactcgtaaaacttgcttgctggtttgcatattgttgttatattgctccattcaaaccaagagttcctctgtggatcttccaatcttctacactcaaagaatctgtattgacaaatctgtttctcgatgttgcaagcatgtctccaacaagcttcttgcctctctactgctagcaaataccaacaagctcctaaaacctggaaacagttatctccattttcagtttcttttcaagaaaaaacagaacagacctaatctgctacatttagtcttacgatagatacagtagaccctatagctaagagttgagtaacttacatggcttgctagcatatatagcataaggttgtaggcagctcctgcccacgcggtctcggttacaacaccggtggctttaatgatctggcgagatagcgggaatattaagaacatccgtggaacatactggaaaatgatgatgaatctaagaacattcttggtgtttgtcattggtgagcctcttagatttgggattatgatccaaatcagaacctgaaaacataacaaaccaagattcttagagagttggagaatcacatatatgaatcactgaagctgaagatatatatacctgaggtaaaggtaaagcagcaacaagatgaatccaaaagcttttatgaagatatctccaagcaatctttcttgaatcaatcacaagctcacctctaccaaatacacgagaaggaggcgcgatataagctgttctaaaacgtataagaatctgagcgatgtaaaaagcatcagccaaagatcttataagtgtaagaaccacttcaagtctaactccaatagtgatacacgcttcatttctcatgaccggtaagaaaaaaaacaaagggtcgacgaatagagaaaccaaacatgctatgagaaaaatcttgttccatcttcgtatcgtttgtccacgaggatcgagtattttggtttttactctctcaagatcctcagagaacactcttgagagtactttggctttcaagaactttcctttactcatcatcttcacattatttatttgagttccattgattttgaactttagcttaactccagattctcctccatgaacaacttcttgatcttcttgaaatctataacataaaattttggttatatgtttgataaaagaagaggaatattaaaacagaggacaacaagtcctaattacctcacagatcttgagttaccataacccatgtcttcttctttatcaaatcctctgacttcacgagaagtcctctgactttatcaatgaaggaaccatttaagccaacttgggaacattaaattttccagaagaaaagggaagaaagcgaaacccatatttggatcagacacgtgtgtttgtagacaactgtacgaaagatcaaatccgcataataatatcaagaaatgattagcaataagattacagaagagaagcttaaagtatgatttaaagaggaattagatgagatgaatctggtttatggaaaaaagttttagttgcttagactacaagcaaaaaagccgtaaaaccctccaacagatagagagattacttttaggggaaatgttcgatgtgaaaacaaaaaaaggaaagttgaatattaaggcaccgacacaagaacaccaacaaaagaagctgtaagaataagaagtaggaccagaaagagactatgtgttgagagaaaaagaacaaaagaaagaaaaatgttagaaagagatgctaaaaaaggtttctagtgcaatggtgtgtgtgtggacaaagtggaactttttttgtacggatcacatgatttatacacttttaaaacgtagctactgtggtactaatatagttgtttacacatatgtaatttatataaagtacaaagccaaattatgatgataaaaacaagttgttgttttttttggatgaaaaaaaatagaataaagaaagaaagagtttgtccatttaaatataaatctgattaatttaaaatttgtttgttgattaatgtaatgaaatacacacctcatgttgagaaactggcattaagatgaagccgagattgaaggttaatagaatacagccaattagccaaaccgatcgcgcgcaattgaagaaggtggagaatcgatgaaccgagatcaagaacatactcaaattagaaatgaacaagggaaatattagtgaatgtgaatgatcatatgtctccactagaacggaatccagtatcatctcaagaatacttattaatgtagagatataacaaaggtaaagattaacgattaggaaaattcacttacaagatcaaaaacatcaaccgattcaaaaaatcttcggtttgatatttagtcactggtaactcaatgattcgaaatcacactttaacaatatagtgttacaaaaaaagccaatcactataaaagaaaaacatatctccttcaatatttgtgtatgtgtgtcagtacatggacatgtatactaatagtagtaacatagagttcaaaaattaataagatggtggatttgtaagatccaaggagttgactcgttttttggaatccagccatgtgtttgtaccagttcttgcacggaccacactgcttgactttcaagtttctcttaaatatttaatttggttccaatttttacgaactactgattagttttactttgtttgtttctttctagatatacatcttgtttatagagcattttagtccacgctaaagttaggttccagtttccctcatgttttagatgactctttgtaagtgttgtgttggtgaattgaatcaatccctaggcccttgatacatacatgcatttgatgatgttttaactaatttgttcaagtgttatagtatttgcttcgtcgcctatagcaaaccatatttgtcttctattcattaaatctatccgaaactacgtttacgatagtaataatttggtcacaaatctcgacgtatttactcatcggattagattgctttaattgcaccactgtatatttcgttagattattcacatgtcataaaaaattttttaaaaaaatgccaaacacccctcaaaatacgaagactatttgcatattatattgagatttaagctattacaatagtataagatgaatcggtcaatgtagtctcgaactagcaaaatgacagatttcaaaactaaaataagttggatacaccttccacacttgttaatgtataaaaaatccatcagttttgcattttaattcgtttctactggaaactcacatatttatatattgaagatgaattgcaaagaaaattcattttagtaaacgtatacgatattgttcacttcatcgaaattttattattcatgtcatttctctagtcatcgaaaaaatgttttgtcgcctctctaatttttttctctagttttcgaccttctaaaactcaggaccggctatatgtacatacccatatgtaattgcaacaatgcagtaagagtataaaactttcctctgaaaatgcttttgatatttttccttataattcttatttggttcatttttatagagtaaagaataaattaagagacaaagcttgggttggcaattaatggacggttacatttggaataaatgggtttgattcgtccagtctgtggaacacaccatatgggcttttcttgattgatcccatcatcccccaccttctctttcttcgattatccaacatgttgatgtaatgatgttactatactacccaattacttttcctaaacatttgtaaaatcagtcacaatgtataaacttaccatatggaacgacgactctcttcgatcaaagattttggttaacttcaactatcttgaaaaatctttgcaaaagattgaaaatagttcgttcaaacttaataccgtagattgtagccggaaaatttagcattttgcttattctcatagggcatgaaaacttctagtcttctaaattctaatattaagtaatcaagactatagaaaatagttcttagtattaaaaacatatgagcaaaacatatgattatgttggatataacatctttgaaattttcatacttagactcggtttttcccaaacatgtgtgtaggaatatatgatgtatcacctctatatcgtattaagtcctcattagtggagaagcaaaaggctgcatagcccatcaagagtcgataaggatacgctcctatttaccttccaacttagagtggttgaggcggagagaaggatcttggcactaaaaataactcaatcaagtattgttctaatctcacaatgctatttacatatgatagcttgttcttttacaaaacaaacttacaaagaaaatcatcagtgacgtaaattaataaatcttcatacaattatttttacatgatttagaggtattctagccttttagtcggttttgatgcaatatttgctatctaaactctactttgcataacatctaataatccaaattttatgaattatccaaatgaaaaaatgaacatgcccattatgtatgtgtaattgtgtatgcaaggccggttcctagagtgtagtggttgacacgaactctttacaatacataatggccatgctcatttcgatttttttaacaatgaatcaattctgacttaaccatttttttccaaataaaaaaatatagcaaatcttgtgaataataactcttgtgtacattttgttaaatatatttattaaaattatcaattaaaagtcctctagtttagaacaaatcttgacactctcacttgtagtaaactctcaagtctcaacgcttcactctcgtcagagtgagctttttatctacacagtgcgaaatggcagtttttgttctgtgcttttctatctactttttaaatatgtgcagatggttcaagcaagaccggcttcacattcggcaagcagaatgactcgaaccgtggctcagtcagatccactgtttcctcttcctgtccactcttgctccctcctcttgaccatcccactttgctttctttcttcttctcgttactctgcgaaaacaaatgtcgccgatagtaagggtcgattgtttcaaacgctaatatacacgttgttttcatgtaaaacatacctggaaaagataattaatggggaaatttctacgtctggatgatgtgtctggtgtgatggttgaaagaatctgaacaacttctctcattgttggtctactttctggatccaaaagcaaacactctttagcaagatacgccattatctgcatctcttcttccgcaaacttcccgtttagccgcggatcaggcagttcctcgatcacccgcttactatcttgtaaccgtggcacagcctaacacaccacagaacaaataagtttcagagacttgaaatttgttggctaaagctacaactaaagattcataaaccagtgttaattacccatataactaggctttcttcgcctttgttgttgcttggtttctgtatcggtttccttccggttataagctcgagtagaacaacaccaaagctgaaaacatctgacatctgtgaagcacatcctgcaattgcgtattcaggtgcaaagtagccaaatgttccttgtagtcctgtggttggagagcttgaaccgctttgtaaaccatcgctactcaaacacttagccatcccaagatctgttatctgtaaaaatgttatgtgcattaaaacttcaaatttagcctcattgaacactgaaaatgtttgtgtatacttacttttgcatgccaattctcatcaaggagaatatttgtggatttcacatctcggtgtaagattcttggagcggcagcttcatgaagatactcaagtcctcttgcagctccaagagcgacagagattcggatgttccatgtcattttctcccctaactctccatctaagcaatctcttagacttccataagacatgtactcaaaaaccagaagcctctctgcatgtttgccatgaaactccgaacaatatccaattaacggtaccacatggtaatgatggagtcttgataataactctacctgtgagaacattaataaagacattggatcaaatatgaattccaaatgagaagtaggagaaatgagattagtacctctgttgagaatagagtgtcagtgtcgtctcctttaggggtatttagacgtttgatcgcagcggttttaccgtctttgagctgtccacggtaaacacaactacttcctccatgtcctattacactgttacttgagaatttattggttgcttgctctaattctgtgtatgagaactgaaagatagctccatggattgtttcaggtttgctcacacaaaacaaagaagcattctgaaagaagcaacctgaagaaaacaaaacaaaaacaagttcttatttcctcttctgtttaacgtatcaactcaaagaaagtaagagggtaaaaatgattgacctgccactgaggagctgatgctaattttcgattgtgaaaccgagcttttacggtttattaagttagcagagctatgccagctagattctctatctgaagagactgaaggggtttgtccagaaaacttgtcctttctacaaatgtaacaaatcatagaggcaaggaatgctagtgaaatgagtacaccgcagaagagtagtataactataacgagtttcctcgataaatattgcttctttgaagattttgtagcacctggaaacaagtaagtagaccaacttatgatataatcgactaagtttgcagtagaacaatggatatagtaaactataccagcagagcagttgcatgaagtgaagcatgacgaatttgaaccaccaatggctataaccggaaatccatttgcaggacacaaacatacccattgatctctgtctgctaacaaaagagagagtcaaaaagttagttttctctagaatattgaaaattttctagttggtaaagagaaaacgaacctggtctgcaattacatgatgtggaacagttagattccaggatatcacttcgattgcccgaagagaaacacgtacatgtatagttgcttacacctaacaaagaaacgtcatcaatttaaatgaaactcacaccatgtttttatatatgttgctgagtagaaactaacctccataacattgttgaattgatatgagaaccaaaaggatcgcaagtgcggtttccactctcatcttcattgccagcgagtggagattagataaagaccttcatgtcgaactaagctcaacctccaagagtgcaagaatctaaaacctgaaacaagttatgtttagattagaccagattacaagtagagtagaatttttatagaattcacaggtaaaactacagtgtaatgtgaatgaatgagttggtgaacagacatcgaaaagattctaactctgttacacccactatgaaccaaaaacattctatgatttggtcaagagtctccaattcttaaaagggcccagagttagaagagaaaacaagaaactcatagcgatagatatacggtccacatcaatcatttaaagatccattgtcactcatctgattctgcaaaatctttagttccctctaaagttagttggctatgttttcacatacagacaacaaacatcataacacaacaaccaaaacactaaaagaaccaaacaagagagctaatatagattacattaccctgcaaagtggtgaagttgaagtaagaactacagagtcaagaaaaggaagttgcagacaagaggatattaaaaagaagtaatggagcatcttgaaggatattgattactaaaataatgtgattaaagaaatgattgagtataggattagtcaaagaatggcaaatacaataataaatggaatgaaaacagaccaaccaccaatagaaagaaacgggcattgcaaatctgagagtgacctttcaaccattatagtaatcaaagaggcagaatcattgaaaagctcttaactttaaactgtttactaatggcaaaatctttatattataatcaaaacatcttaaactttaccaaaattgataaatattagattttgtgaatcttaacaagaactatatgatgatactgtaacttagctcacatgactctttctttatgaacttgacattgtagattcttgatccaaaattatagacaaaccaaattagatagagccaaaaaggactttgcttttaaggaaaagcaaaacgttggtcgaagcaaactgttgaaatttgttaggacccagaatttccggtgtcggttgtcaggaaccggtttaaaacccggtttttgattgtgggactcacaattcccggtgtcggttgtcggaaaccggtttaaaaaaccggttttcgattgtaggacctgtttcctccaccattgaccgaaaaaatctaactttttgatggaaagaatcatgtcccacaaattcaatgatgctctctccaagtaaaaggtgaagtttttggggaaccccatttcatgatttcttcatacatgtagggaaatgaattgaaaacgcatatttaatgagaaacccaccttaatatgaagaagcaacaatgtcgatttttgaggatttggagcttgctacagcttatagtagaacagagagtaccagcattggagctaaaacgcaaacgcgaaatggagcaaaaccgcgtttgtagttgagtttccagcaaagataaaactttttccttgaaggagaaacgaatccctttccacagtcaaatcagaatgagaattaagaaatctaaaacgcgaaataaacagaggagtccacgcgactgcgtttgcgttagcgtttgtggtcgagtggagtcactaaactagtgaactgatgtatcgaggggggcgattttaaaaagagttcatttattagagatcggggtatgtcacgtgccacgtggcgctaaattgatatcagagattcgctgcatgaaaaatattttcaaaactcgaagtaaggagaaaaaaagtattttgaaaattcctatagagtaaaaataacagaattatgtaaataaattttgattaaactgcaaatttgtgaaaaatattttagttaacttacttgatattctccaaaaaattagtattcgaaatgatccttcgtacaaggcattctcaaatgttttaaagggcctctcgaacttatatattcccttaagagaaacttcaaaaactatatactgatgttatatactcccaaagatttgtcactagtcgtcatctgagagatagaccaagctactgtttgacttcttttgttgttgcttttgttgttcttgagccaaccttggatatgttgatggtgcagcagcagagttgggagctcgagatgatcttaaatgaggtgccatggtccttcgcgctataccatgcactggtggagcagaagctggttgataagaagttggagtatggttggagattaaaggcggtggtcttggctgaggtgtgttgcagggcggtgattgcagagatatagcttttgatgtgactgagggtcgaggatggggagttgaattgatttctgtgtttgattgttttgctggtggttgagatactggttttggctgaggcgttttgctgcgtggttgatgtaaaggacgggcttctgttgtgactgagggtcgaggaagggcggttgaattgatgatatccgtcttggattgtactgctggttgctgagatattggttttggctgaggagccttgcagcttgattgatgtaaaggaggggcttctgctgtgactaagggtcgaggaagggcggttgaattgatatctgtgttggcttgtactaaagctttctgaggtattggtcttggctgaggcgtgttgctgtgtggttgatgtaacagacgagcttctgctgtgattgagggtcgaggaagggcggttgaagtgatatttgtgttggattgtgctaatgcttgttgtggtattggtcttggctgagacgtgttgctgtgtggttgatgtaaaggacgagcttctgctgtaacagagggtcgaggaagggcggttgattgcatctgtgtgtttgattctactgctgcttgctgagatattggacttggttgaggagtgttgcagtgcgggagaggagctgaaagatttggaggtgtagcttccgctgctgtgactgagggtcgaggaggagcagttgaattcataggttcagctgctgtgactgagggtcgaggaggagcagccgaattcataggttcagctgctgtgactgagggtcgaggaggagcagttgaattcatatgcctgttagtttgcactgcttgctgctgctgcgttgaatgttgagagctcctgggtgctaaaaaaagggaagagaattagtgtcgctgtttagctcatttgctttatccaattatactcttcaactttacctcttacggtagcagtatcagtggctgcactcttcactggacaagtagacttgtaagcattcgccaagagactgttcataacaaccaaactccttaacgcttcattcttcttcgcttgagcgttatacgcagcatctacctcttgggatttcctatcatactcactgcgtgcttccgccatcttcctctcgagttcagccttcaactctaatgtctgcttacaaacaacgagacaatgagcagagaggacaggaaaccgaataaagatagattaaccaagaattagaaaaagactaaccgtctcttcaaagcttttcagtaaggtcccttgttctctgctcagcttctccagctcgtggtcacatatgtcactgaacgaagataaatgtaaccgaggactctgtcccatatgattgttgggaagagacgtaaccgctgatgcattgactgttaatctgctatgtaagacgttaggaggctgaacaccaccttcaacgacatcctctgaatggttaactacacaacgatcacaacatacaaaaatcttaacattctagcacaccaactataattaaagcatagcgatcactatcaatgggcagatcctgacctaaaggagtcgatgtagaagtccaatgctccgctgctgttgtgatattttggacgggaactgacgaagatggtggacaacccgtaccttgagctctctgtagacgaaaaatctaattcgtaagcacaataaacgatctgaaaccaacaaagagtaacagtcgttttcaagaagcagcaagtaacctgatctgatctagcagaaccttgaatatctaatatagaggcatggtctggaaaacgactcgaaaactcttgaaccaaaatggcatcagcatcatgacttgttctattactttcttctctaatcaacggcgcttcctctacattcaaaggtaactctaaggaagcagctccggaaactgaaaccggtggcatcactgtgtcacaaaccatatcttcagtcaaaacctcaggtatatttgctgaagacaccattccaggcccatctagttgagtactacccgatttactctgcgcttttggtaaagaatctgtaacttcttgagtttccattggaaccataacatcaaattgctttcaccagtgaagaggtttagctacacatcataacatatctcagtctattagagaaaacaaaaccaagctattcaaatttacaatctttgaagaacacaaacacactaatcaccgagaagttgaaaatgagagtgacactttaacaatcatagtagcaaaacatagaatcaacgaaattaaaaccatattatatataaaaatcgtaactttattcccaaatttcatatatgctagattgtgaagaaccatttttttcaattcgattttgaaataaaaaagatccgtgaaaataaaattgcgagttattgtttgagaattgaaagagaagaaaacccagaaccgaaaatagacttaaccctaccttaaaatgaagaaacaaatgtcggattcaaggttcttcttcctcgtctacgtgaagtccaggttaagaacagttaatagaatcaagagacatggagtatttaattaagctgtgttgggccacatttattaagctgttttgggccttcggcccatacctcaatttcgattgggtttgttgatataacatatacatatgttttttttattttttgttgtgtcagtttcgaacagtgtttgttttgtcattctccctcaacaacaatgcccgtcaagtggtaagctttgatccaatttcgttttccaaaatctcgatttttttcgtttctgttctgattactcttccgattcttgtatttgggttttgtttttttctagggttttacattggcaaccaaaccaaggatcaacagtaagcagccaaatcctaaacgaagcaacacaatgtgtagagagcatcaatggtgtgaaagaaggaagatggaaagcaacactcaactattacaaacccatgttaaaagaccaagcgaatcaattggagtttcctcgtgattttctagggatttcacttgcggatcagccgaataagtactatttcattatcaggacgcagaggattgtcttggaagctgattcttcgattcagttgattatggagaagcttcagtcttataaatctaaagtggctctttactttgatgggtttcagtatcagcttggtgattttaggttgagagttggtaaagttgttcctactcattctgagaatgttagaggcattgtcatggaggtaaacaaagtttccagctttttcttgtttaagacagatatgatgaacactgaacagtggtgattaattttaaagatgaaaatcttgtttttctacagatttttcttgttaaaagagtttcttgtaatatcttttagtgatgatccttgatgctgtttatgatgttaagacagatgatgaaaattgaacattgttgattgttgactatgcatctacaagtttctttagtcttgtttcgtgtaatcacaatgatgatgaaaaaatccttgttttcttaaatccctatagtctcaatgctaatctaatcacctaaagggtatatggagctgttcccttttggtgattgtcttgtttcttgtaatctcaattttgagtttgtgtgttgttacttgcaggtggagtatcttcctatatcatcaatggaaaaggcacaaaaggtgatggaggagttcttggagatatggaatgaagctctggctaaaaggtcgttgccgggtaagtttgtgaacatagatctcaactttggggagtttggacttggagacatctacactccacaacacacagctgttcgttacgctctcgtgatggctcacatgattgctaccgttcaagctgtgagaggctaaaccaaaacataacttagtatttctaggtaaaattatgtgctttgcaatattagtgatttctttctttggtcatgtttatctataagaagcattgagaaaaaatgaacttataaaagactttgatagaacaagttgcaaactccagaaaaaacttgagattatagcagattgtgatttgaatttcgattaattgtgtaactcattcgcatattttttcatttaaacatgtctatgtcatatgcttttagtgacagtacaaataaatcgaaacaaaactgaagttaaaaccatgaaaatgtagaaaagagaatctcttggtttgtttcttcaactccacaaagcagaacaattagtgggactgaaagaaatcacatttgaagaaggatcataacccaccaaaaaattgttctgcgctctgttcccaaagacagcaggcattgacggatcattacacccaatagccaaacaaaagattcctccggtaatcgtttcgagatacatattatacttatccaagacaagatccgcaccgccagaaaaatgcattgtgatcacgggaaagatatctatggtgtccgagtagtagcaaagcaagttgtcactgcccatgtcaggtactttaactgctgtcacaacctgttccactgcctccctcactaggttgcagtagctcattggaaagtacgtgagagtggttcctgagtctataaaaatgttcccgtcttcggcatgaaacggtgtccccaatgtcgcaatcaggttgtcctcaacgctgaccgcgtctaggtttagataatagaaaggattatctttcttgataaacatatcggctgctaccgttccatctcctgccacaatggcatttgttccaaaattgatcttactagttccttgaccagaaaagcagtaagagataagacctgggtagggtaagtccatctgagatataagcgacaaaggtcccatatttagaccaacaatgccggaagaactcgatgcaaaccctgagtactggaggtttgtgttgtcgaggccacaaccaatttttgtttcagccatcacaaagggctctcctgaagtggaaggtatcgtgaccgtctcggttgccaagattcccttggaataggttttgtccgcgtagataatctcgtaatgacaagagtttccattgcatctttgttctctgaaggttgaagatttcgaagggtcgaatataggagcgaattggctgtagcagttaggacaaggcatacattgtgtccatatgatgtcacttcccgtgtctatctccgctacgatctcgaaaggaggagtaccgacttgtagtttcattagatagatgctgtagtcatataaagtatcggcgtaaggtgatgctccttgcaactgatttttggacagccgagacgaagatgaattcgaacgacgctggatcaagtcaatggtgaagccgtgaggtgatgaggcagtggtcgtgaagagaaaacatgtaatgatttgaagaaaaagaacgatcattgtggttgcaagagacattgattgatatcgagtaatatttttggtttttcagacacaatgtaatgttctttattaattcatgcacatatttatacatgttagaccttttgtcgtaattgttaatttttccaaatttgtcaactttgttcaattttgttattgccattacgtcttctaacttgggggaattttacattttgttactactaagttttatttttctctctaggttttacattcttttatatttactttttgtattaatggaaattagatgatcaccttgctatagcaaaatgtataatttcttggaaattttagtataaagttattgtcgatgaacctaaagtactatctaatattaatatatttgatttaacttaagttaaatttttcactacttaataatatcatcattggtgagatacccaaagaatatttcattaatataatattatttatttccaaaaactttatgttaatttttcattaatatattttaacatatcaaattacattgtaaatatatcgaattgtatgaattagtcatatttctttttagaaataacaataataaaatcatgaatattaataatcttaatcgtaatagcaataactaataattgctcatacgacacgacacacacatacaacttaacaaaccaacaccctgtgtaagtcatacaaatcagtaaatatgtatatatcacttcattctagcttggccttaatccaactctggaatagaactacaaaaccaatgtttgaagtgtaaatttgaccatatgagagagctcggtgggaggagttaattatcacaacttgtggctgctagggctctaaagaggtttggaatatgagactttacgtattataggtttctttctgtttttctacaaacttgttaatgttatcatttggaaggtgctaatatttgccaatctttaagcaacccatccatgcaagaattataaagattctaagtaacttcgcatattattcatataaacatatccatggtctatgcttttattttgataagatatatataaataacaaactgaagttaaccgagaaaaacaaactgaagttgaaaatgatggaaaagagactctctagggtttgttacttcaattccacaaagcagaacaattggtgggcttgaaagaaaccagcagtgaagaagaatcataacccaccaaaaaattgttttgtgctctgttcccaaagatagcttcttgtgttggactattacatataatagccagacaaaaaagtcctccgctgttcgattccatatacatattgtacttatccaggacaagatccgcaccgccagaaaaatgcattgtgatcaccggaaagatatctatggtctctgaaaagtagcaaagcatgtcattgccgctcgggtcaggtactcgaaccgctgtcacaacctgttccactgcctttcttactaggttgcagtagctcacaggaaagtacgtgacagtgcttccagagtctatcactatgttcccgtcttcggcatgaaacggtgtccccaatgtctcaatgcggttgtcctcaacgctgaccgcgtctaggtttagataatagaaaggattatctttcttgataaacatatcggctgctaccgttccatctcctgccacaatagcatttgttccaaaattgatcttactagttccttgaccagaaaagcagtaagagataagacctgggtagggtaagtccatctgagagataagcgaccgaggtcccatatttagaccaacaatacccgaagaactcgatgcaaaccctgagttatcgaggtctgtgttgtggagcccacaaccgatggttgtttcagccatcacaaagggctctcctgaagtggaatggatcgtgaccgtctcggttgccaagattcccttggaataggtgttgtcctcgtagataatctcgtaatgacaagatttcccgtggcatctttgttcgttgaaggttgaagatttcgaagggtcgaatataggatcgaattggctgtagcagtcaggacaaggcatacattgtgtccatatgaggtcacttcctgtgtctatctccgctgcgatctcgaaaggaggagtaccgacttgtagtttcattagatagatgttgtagtcaaataaagtatcggcgtaaggtgatgctccttgcaactgatttttggacagccgaaaagaagatgaattcgaacgacgctggatcaagtcaatggtgaagccgtgaggtgatgagacagtggtcgtgaagagaaaacatgtaatgatttgaagaaaaagaacgatcattgtcgttgcaagagacattgatatcgaatggttttgagacacaatgcaatgctcttcattcatgcaagtatatataactttttgtcgtcagtcgtaactgttaattgtcaaccttttccaattttgatatttccatgacatggggaaacaattaattttgttactaagttttacatttttttggggggcttcattatttttaaatggaaaatttatatcattccgttgaagcaaaatgcatatgttcttttttaacagaaaataaatgtatatgttctccaaatttttacttttccctaatatgtatatacattctttactctaaaaataaaaggaaatttacataatcatgaaaattttggtctgtataagtgtaactcacgcttgtttgtagtttgaaccggccttgcatttgaactcgaatccttccaaaaaaaaaaaaagtgtaatactcttttttttaaacaaatataattaatcccattggtgatatataaaggttttaacgaagaaaaaaaacggtaaataacgatagaaggatgattaaaataaaatatacctttgtaatgatggtccatgtaacattttgcttacaaggaggagtggtaagtgatccattatatctataataatttccgctctcaatcttagttttacttgaatctatcattactattgtaatatattatgataattttatgtttcacgtgatataccacttacatagcagtatatcacgattcaaaaggtgagtagtaattttaaaggaaaaaataaatttgtaaagagcaaaaacgcaaagcaaagttcaaaatggtatttgatgaaatatatatctgagtaatctgactatcaatcacattagagattatcacaaacaagtattatggatctattaacgatatttatccgctataatccatattcgaatttataaatttgcatatcttaaaactaaaaatagattaacatggataacgaatcacattaggtatctcagataatttacacattcataatacacatattctttgaaacttgaaagtaatcattttatatttgaattagattggattgaagatcttgaaactacaggaggaagatgggacaccatatgatactcaggaaaacacatacatcatatatttttcgtgttatatataaaaactttggtgaacaaaaaaattaaataaatagtacactgtggttgtaaaaaattgaaataaattaattgtatttgattcatgtgacgccttgattcatagtgattttggtttgtataactttaccacgcgcttatttgtaggttgaactggtctcgcatttgtgtctgaattctgcaaatttatttttcaatcatatttacatttttgataataaacaaatataatatacattcaacttctaagatatagtatagttgtgaaattcactaagtaaattatttaagtaaaacttacatcgtgaaccgccactctgagtagcttcacttggtttttcgtcacagtccttacctaaaaaaccaaccaaataaatttaaacgaatgattttaaaataaaaagtcaaaatttaaaattggaaaaatagacctagttaacatgtagatggataaaccttttggatatggatattcacactattagtaccttgtaatgatctattaatgctatgtttgattaagtaaaaaagagaagaaaataacgatgagtatttacctttttaacgacggtccaaataacattttgcgtacaaggaggagtagtaagtgatccaatgtatctataaaattttctgctcccaatcttaatatcccttgggtcaatcacatctacatatttctccgcctcattttgatctgtaattgccgacaatttattttccagctaaccaaaaaaataaaaaataaaaaagatcaagattagttaagataataattaattatttataaaatttaaaagcttaataactaatagttctagcgatttataccaatccgagaaaagaatctggccttccgattttgtagaggactgtgactacagccaaacttccgttaatgttttcgtgaaccatgtgtagctcgagagcaaacctgccatttattatttaccatatactctatatatattaactggaatgtaaaaattgaaagtaacttttaatttgcatactataagattctatgccattaatttatcaaaagttaattttttttttaaacctcgacaaatagcataacttttaagtaactagattaagaaataatgtgtcaattaaacatttagatcaaatagataatatatataaattcaacactataattaaaactattaaaattggatttttttttgtagtaattatttatgccatcatttttcatatttaaataggagaatcctaaactagactaaaaatggcagttttcaatttatcttgatctgcgaatccatagaataacataaaatgttattaacatggcctgggtctgttaatgcctcaaaatgtgttgtgtatatgttaatgtatttttgttctataagattttcttgtaggtataaatggctccaatatcaaacaattatcaacacaagaaagaacattttgttttctatatctacaaagttttatggttcagagatagattaaaagtatggtttcgacatcttaagtttgtaatatatattctttctacaaataatcaaaaatagcaaaactattcttttattatctagatattcataattgtaataagtttcaattaaagtcttgatgtgaactaagtacttactaaaaaaaacagctaaccttttaaatagcatcaacgatttttaatgcaaaaagtttaaattataaagtcttgtcgtcttgatgtatactaagtactcgcaacggaaaacaacttttcttgtatctatattatattttttatttttcgtagtttaattcatatgagattttttttgataattagttcaagtcatatgagatgagttattttttactcatatgagatgttttttaaaagtttctaaattatctttagaataaagttagtttgtattatattaagttatagtattgatattggtcccaactattatggtattgcttaaatcttgattaggtccaaatttatatttatagagatgaattttagttggtaaaaaacagaaccaaaatatgaactgcttttaataagaatatgaaaataatacacaattgttatggtactaaaaaaatagtggactttgaaaaacttttgaattatataatttcatttcatactcaagtaaggatatgtacattgagagggttataatcaagagtaaatgagagcaaaattttgttataaatatttaaccggtaaagtggttttcgctttatgagaaaatttatttttttgattaaattattttgtctataaatataaagtacattaataatgattaaaattttatgtcaaatttaattaaaattttatatgccatcatatcaatttaatgtatctactcccttttgttgataaaagtagtatatcaaatttttataaacatttcatgtatatacttatgttatagaatgttgcacaccttcttccattcatagtatgttcagagggagaatgccaatgaagctgtaagagtttatactcagttccattgaccgtaatactccctgacccttcttctccaaatttcagctgccacaaaattagtataaagtatgtaaaaattttgaaccttataaatgagagaaatgtatgagaatgggtaataattgataccatcatatcatggcctctatttttgagagtggcgttacaaggtttgtagtgtctagtaagctttttaagatgagtaacaagtctaactcttttgttcataagatcaataggcgattgcatttctccttttccgcacattttccattccggtcttagctttccccatttcgctggcccgttctcttggttccattcgtagctgaattcgtgttcatcctctacatattcatccatccatcatataatttagttttcaaaatgcaaaaaaaaattttgttaagccatatgtaatttgtaagaacaaaatgaaccaagatcacttgtgtagcttaccaacttctctataatctgtcgctgcactcaaacacgaaacagtggtgacgaagctggtgagaactaagaagataaagcatcggattgatattttatccatgtgtttgagagagatatagagaaggagagcgagagaaggagagcgagagagagagaaagagagaggtgatgattggagataaatgttttggtgaatgcaacttggatgcaattgaaatatatatagtagaagatgaattataagtgcattaggattagatatgttatacgtcagcttagtcgtcacgtttttcctctaatattatttaaagtaattttaatgccgatggagacgacatgtttgactcttgttgaaaaaacatgttttcgtttctctttcgcgttattttgttcccaaatctctttcttatagatttcttcttggattctcaagattaattcacattcattgtttattcaatttgtcaagataattttgtatgtatgccgactaagttcgaaatatggcaaagcatttcgcggacaagttttacatatatgtatgtacatgactactacataatacttacagttacatagaactaagctacgtgtacgtacgtttcatatcgattagtttggttatcaccaccattaatgcgccaagaaaaatcagagaaatgtacatcatattattaaatgaaagttagaattaaatattgactcttgacactttatttatattgcagaattaaagctcgatttctctagacaagaaacacaaaaatatcgaaagctaataaaacgtataaagtagcatcgcaatgcatccaatttctcaatgactccattttactcaagcttacgtatccatggaaataagcattcatgtgagtaagcaaattctaaaactaacgttaaaatatcaatgtaataatcacgcatagttcagtaattgtataatttttttatgtaagtatatatttaatattctaaactaattctcaagtttttcctaggacagtacattattttataagaaaactagtattaaaactggaacgatacatataagattagtaaagatggcaagaaaaaatcgaaaaatagtctaaatttttttctttaacaaaaaaaaaaaaaaagtattagaatatcaaatgtgttcaatgtgaaaactgatgtatcaacaaacttaatttgacgtctaaaataatgtaaagaggaggaaaattctttggagaatgggaaaggaaacctgaagcaaataacatagatatgttacactcctgtgtacacgaccaaattgaaccatgaaaggaaactgtttgatctatacaaaagagtaatccatataatttaataatttaattatggttgttggtttattggttgaaacacaatatttaacaaagcaaatggaagtttcgtaagcaaagtcaaaagagtggttcaaaatttcatgtatgataagctaatgaatgatgaaatgatgcttgaattatcttatcatagctagtgtccaaaaatcattcaatagaaatacataagctggtccaatatttgaaacacaagaggtgactttttatgacttcaaaataaaaattaactttatatatgacttgtacacggtcgatatagttatgaaataatttaagtttgattgttatgtattctagaagagtcttacggctgctagagtcttggggtttaaaaattcaataatgggccagaagatcgagcctatatacatgcaaaggttcggaaatgaagcctaatataaaaccaaactaagagttacggcatatatatattttttttaaaagcaacagaaatctattttttaggagtcctgaatcaaattcaactaataatacaggaagacatgaatacttttctacccccaagatgaaacagaagtcgatgtaagtacatagaatccgacaacacagcttacacaacttgaaataaccaagttacactagaattgattaagttaatcttttacaaggattacacttaatcggtgttacacaacactagacctacctatagattgttcccgaaaattctagcctaaacaagtttactaataaatcacccaacagtgaatcaattgatatctcccaacaaaaatatctaaggaacttattcaagcaaccaagccacatgataaaagagtgtttagggactgcccctgaaaaccagactgacttgcttgtgccaagagacatctggttttgtagtcctgatcttattccaagtatcagagaaggtaaaccggtcttgatggtggccttgaattcatgacccacagaaatatatctttgttggtttctgagatttgaactgatggtaggtgacataagaggagctcaatgttttggcttcaagcacctccaaatatccaaccatcccctgatctttcttgagctactttcgatttcaaaggacgaccaagtagcctatgagcttctgctcctaagaacgtgtgcaactgcctaaaagaagtccaattatcataccaaaatgagtcctatcatcataccaaaaggagcatgatttaccgtcacccactttggaagagagaaaggttttggccaagggtcttagctttaaaagctgcttccacatggaggagcctagatgctagactccaaaaacactgctttcttagcttacaaatatccaatgcaatgctaaatcgaacaatagtaagtaaattattgtaggataaatcaaaatacaatcagagaccttaatcaaaatagttaaattcacactagaagttgtatatatttctgtagaaagaaatgtgtttctattaataattctagataaacataaccgtcgactagtatgctaatcgaacatttcgactcaccaaaaatgtgaaaaaaaaaaaatgttagtggaaaagagtgtgatacttaagagtaaaaataatactacaatcatatttagactcgagtactattggacttgtggatcagtatgaaaaagtatcgcttttagtagttatagttatgtaaatgacacctacttatatatacatttgatatatttttctgacttgggtttttatatatacatttgatatcttgaccacaaatatatattacatatatatgaatattagtgatttagcgaatcatgagagtcaatggtatccacctttagtttcattgtagctctatagttttttcactaatctataaaataaattcctaaaaatagaagttgtataaagaaattcagatcatgagagaacaagaataattataaaataattgcaagaataaaagttggatcatggatacaacagcaagaataatcctaaaagagaaggactggaagcaaggagtgaagcggtgagtgaatcttgtgactgtttctgctgtcactgtttatctttttcctttctttaattatttgatttctgctcttttttctttttctgttctgttataataattgttagtctgtcataattgattaaaataattcatatatttataaaagtgtaaatgtggtgaccagaaaaaataacaacccaaaaccaaagaagaacctaatccacgtctatttagttgtggttgtgattctcttgccaaaccctaagccggtcatcaccacgtccatctcgtgtccactgcctttctatttatttattatttttgtatcaattcacaataattttacatgataatgtttttctaaaattttctttttttgaaaatatgaattcaaactcgtatatacaaaatggtaatgaaatgagaatgatgaggaaattctcaaactagcattggtccttatagcataaagtcgtaacagagacattattattatctctgcaaagtaacaaaaatagttagatattttattagagttttcttttctaataatcaggtgtattctaagtttaatcttaaataataaaaattgaaactattaaaatcagatattttattgtcacacttttaaagggaccaacatatatgtctattggaccaaaagtccaaactaatctccataaccttataaaatcaaatagttttgtcactctagacgtctacagtaacttatcatagttaaaaattgcagaaagaaagtttgaactctcgtcttccaaagtcatacgttacccatatgaccaaaaagttgatttatattggaaatattttcctaatctttttttctagatagtttatgctatgacatattttgttgccaacgcagaacaccacaccacgatacagcgtttggctgcaaacggagaatctaagtaatcgtgggaaaagaggcgtcttcaagtaatacaaatagttgcttcacatgttcaagaaaaaaaacaattttagtaattcataatttgcaaattttgttaaataaaataaaaataacaaaaaaataccttaaaaagagggaaagaaaagatgccttggaagtcacttacttttcgtgaatgaaaggcaaccatgaacactaaccacttgcttactcaaactattcttacttcaacaagtagatcatctaactatcacacaaccctttacttaactcccactatattcctctctttcattataacttgcacatttcattttcctcttttcttaaaaatgataatatttgattcaatttaaaaaaaaaataattccaatgatcaacaatatagtagtaagtaagaagaattcacaaatatttcatcatattatgtagtaaaaaaaacaactagtaatgacaatctattaacgctggtgttgctgagaatactatcccttgaaactttgactctcttagatcatcttctggtgctggtagattaagatccaacggtagatatttcctctgctgttccatcgaacggcctatattgatctcaatctcttcctctgtactgtttctgcttacttctgcggtggctgcaacggggctaatcgtggttacggctgtcctgtgccgcctcatgtgaccaccgagagcttgcccggaagtgaactcagaaccgcagatggaacactcgtgtactttgtttgccttgttgatgatgttacttgcctgtgaagctagggctgagccggaaactttgaaatgactgttttgcccttcttctgatgcactagacttgggttgcgtcaggggtagtctagtcttttcctcagtcgacgtcctcggcttcttgtggctcgctctgtgtccaccaagtgcttggaacgacgaaaacgtccggttacacgttttacactcgtacacatagaaactagaattctccgacgaaatcttctgatgaatttttctcgagttcttgagatccggcgatggaagaactgtcccacgagctaacatgatgagacaaatcgccatgtcttcttcttcttgcgtacaatcagtagtcaccggagacgaaaccgccgagttgtattcatctgaaacagctctttctcctccacttccaccggccgatgaacttgttgaagtcactgttgtcgccgccgtcaccacaaacgtcgaagacgatctttgtcgcttcgtacgtttcccttttatgatttgcgtctgatcactcccaacctcatcttgacccatcatcatatccaaatatagtaagaaaagaagaccaaaacccaattcaagaaacaaatcaagaaacaaacccaattcaagaaacttcgaaattatggagaagagaatgaaatctttggtgtttattatgtggagtgaactaacaagagagagacagaagagaagagagaagagaggcagtgaagaagacgatggtggggctgcttatatatatatttatcggaaaaaaaaagagagaggttataagtttggtggttgttaatctttttagtttactccacaaaagattttacacatcgatccactttacattattataatgtttttagctaaccaataacattttgacggttcactctatacccattacctgacacttctgcgttttctctgccaaattccataacaataaaatcaatcaacaaatttataattcaatgatgaaaaaaatatgacatgtaaataatttttcttcttttctagtttctgttctgttgtatctacttttaatccatatcttcaaaatctgatctctacctagatctatataccagaagtcaacccttcatgacgttttttcatttattagtattgtattagacagcttcttctagtacatactttctaataacaaacatattaatatcaattggtgtgattaatcaaactcttgaatcattcatattccataattaacagagaattgttattaattccgagtgaaaatgattaatattgtttcaagcaaaagtaggagaaataaaagggaaagtgaaacccgtgaagagttaaccactgaattaggcaaaggttcattagtagtgttgagtggcacttaggccaccaattcacgtttttgttatttgtttttatttatttagtttcgaatttaatttttgggagtgtgaacattcagttctaaggacaaagcaaaggttttactttcacgcactttaggtccacgtcatcaaatcgacgctttcaatgagaaccgaaatagatagaactaaagataaaaatgttcacgacagcaaataaaaagaatatattacatattattaatggtcgtgacgactacaagaaaacttttgattaaatgttttgaaatatactaataagattatcaaagggaaataatgattcacagacatacatggttcataattaggaggcgacatgcagtggccggtgtttataggattaggtgcattcatcggtggcatgttaggctaaaaacaatattaagcttagtctttgttaatgtgaagagacaacaccacgacttttttttttctctcattttttaatcatatcttgattaacatttgtagagagagttgaaagctagtgctcaattggttatctactaatcttaagactggaaacagttttaagataattagagatctatttttacaattgagattaattaacatactcaaattataggccgacaaaaaaaaaaaaaaaacatactcaaattatagaaattttttatgtaacattactttattgtcaaatattggaatgttacatttttgtatggacaagtgacaactaaccattaaaacgagtttacacggtacatccaaaaataatactttatagattatagaataagtaatctatagagaaaagttcaaaaaaaaaaaaactatagacagagaataagttatgtcaagattgagagaccggaaaattatgaagtttagggacctcaaaataattatttaatttagctaggcaaactagattaaaataatttattctggaaaaattatacacctttttttgtcaacatactttcaaagtctcacagtgggagattgaggcttgaacccatatctatgcataaggtataatgcatagtggctaaaccacaccacaaaatccttgtcaaggactctttttaaaaaacaaaaatccctgtcaaaaaaaaagaaaagaaaaagaaagaagaataataataaaatatatttatttttaaccacttctaaatattagtatgataatcatatcacttactttaattttacaatcaaattttggtttatatttttcataataaatatttttataggatctaaatatggattttgactagaaaaatataattgtctttacttcaaattggaaaagaaatgttagagtaaattcatttttgaaggaataataattatattaaaaaatattctcttaagacaaatggtatagaaatttatataaattttcaagtggatatatataacataatttttgggctaaggaacggttatgtgtgggatgcaagtatgttacatacacaaaacccatcacttctttccttcaccgtaatattttgctaatttcatgcaacattttgactttacatagggattgctgctcccatatataatatgtgtgccactatggactataaatactcatgtttgtttttgtattgatgtatgtgtatgcaactaaaaagtgttacaacttgccactggaatataccaatttataccaattaaatgattacgattttgcattatatttactttttctatagccgcaagtattaaaatttaatcttgatagagaaattagacttattagtaagtcgtaccatataaatgctaccgttaagctatagtataaaagaaaggacctagttatttttattaataaagatttgattaggcgcaataattctataacacgatgaaatgattggaagaagttactcttaatcacgttgggctattccaaaccttattgtcttgtacttaaagtggccctcacatcctttgcacaacaatttaatagatacactcacacatgcatattcatattaaaaccattatgtatttagtggtcctaacaaaactaattatatcggtttcagttttacagtcgagacgatacacaaccatgtactcattacgtatacatgtttagatacataatgaggaaataattgaaatgatttggttgctaatcataaacaagaaaaaaaaacagtaaataaaaaattaggagacaatagaagagatgcatgatgttgcgtaaagcaacgacaccaacagatgtgtggctaaaagcaattagttttttactcaccgcgttatatttcctaaaacataaattagtatcctctctataattttacataaattggatttctctgttttaattagtacatttggtgaaatgttaaaatatggtacaacgtatagactatagctctataaaaattattataagaagaaaaagccgtttttgctaaaaaaaacataaaaaaaataaagcaagtggaaaaatagctaggacgaaaccaagtgattatgaatttaaagatcttaaacaagggataaggatggactcattcccaaataagatcagcactcgaaacacagtggatgggaacgagcttatggttgatagttttaacaactttaccggcgcttttgcatcgaccatgggtaattcatccatttgaatttatccatcaagttgtttgcgcttttatattatcataaccaaacatccttagagttggtcgaaagaacaaaaattaaatataaaagatggcgttagataagaatcttctaaactatacgtgctaattgattcacctaaggtaaggtacttcggttcggttcagttatttcggtttgatttttttgtcccaagctaaggtaaggtatacatggcgttataaaatttgtctaagctaaactatacatggcatgacgagattcttccaaaaataatggatgatatttaaccaaacatatatatatactcctatttagtgtttcttatttttaaaataattaaattaaagtgagtttaggtttgcaactaatagttatacgcatgtcaatttatcacatgctcaaggatcaaagcaacgtaaaaaactattctatactatcatttattttcatgttacatatatatactgaatttttgaatttttcagtaaacttttagtaaaatgtcatcactagctactagctagaattaatagaataaaaatctaacacatagataaatggagaaaacaatttttattccactcattcttcaaatatagtaatctagatcaatacatgttttagagccggaattcatatttaagaacttatttgttttaacaataattgagttcgtggcgtccttctatatacctacgttttatggtttaacaaactatacgtagaagtttaaactcaccaatgtctattgtctagtcgaagtctttttgattaagaacaaaataaaaataagactgaaataatgaaagaacaaagaaatagataaatatgacgtacaatgttgaagatactagtatacaagaataatgtaagttagcaaaacagagagagaaagaaatacttagcgtaagaagacaaaggagaaggaagtgtgaggcacgtaagggttaagatgcaccgccgccgcatctttagttgtatcatccaaccaattacacaactcattccacttatttttctaaatatatgcttaaaaaacatttttttcgagaaaaataggtttagaaacaactatatttaatcgcatgtaaatgctcaatactactagtttatttcgacggccaagacgagtttaggctactgattacagattttacacagttggttagtctttgtaatttttattttcttttcgcgtctaaacaatcgttataaaaatttaaacgattttgaaaaatctacagtaagttatggtataaatattttatttctaaataacagccaactcctttctagtttttcataattattttatctaattttaattggttggtatgagtctggcattacatgtgacatagcttccaagttaggattaaccaaaagatcttatttctacaaaaccggatccaacccactctttcgcttgctttacttcacttgcaggttgttgttttcctctcaattcccataacaaatagtataattctatcttagtttatatgtggctcttataaaaaaatcatttattagttgtaacctaatgataaatcaaacttaaaatatataaagtcatctaaaataccattgcttgatttgtcaaaagcaaaaagctttcactttttgttaagatgtgttaggttttaatcaaagaatattaagatccgttggaactcatttaattgcatatctaaaatggtgaactttagaaagactaccatatttaagctatgtaaaatcacttcttcatttcaaaagcatcctaaatctacatacaacttagtgatttcaagttctaccaattgattcttcatgatcacttttggttagtgcttgtttttttttttcccttataacaacaaaaagttaaaaaactagtattgacttctacttaaaaaaattataactaaaaaaaacacaacaaaacatatacatgcatgtttgtctaatgaaagaattaaaaggcaagttctttaaatatataaaattaaaaataaggtgagaaaatgggtggcataccaaatagtagagaagagagagtggtggtgggggctttaagacattatatataaaaaagaagtttttgtcaaaaaaggagtggatagacacaacacaacacctcaccacacttcaacactacaacaacacctcactctcttacttcttactcactccacttcaccacacacttcttctctcttcctaactagctgtttcatttatgtatttcaactttattcatgccattacccattattcatgtttaatggaaagcatcatataatttaaaatatgatttgtattttttttttttttgtaaactgtaactattcttcaatctgttgatcgagtaaaaagtaaagaaaaacaagattcaacacctcagttttataaaagttatatcatagtaaaacaataccagttgtttttatcgatagtaggaatattgttcatattagtttacgattttaatgttttatctttgaatagttagttaatcatctacgatccactactcgaaggataagcatctagatcatatcatcttagtcttttcaaaaactttttaaattattcttttgaataatataattgaaatagtaagatagttactttgccatcaatcaatttgtatagtccttgaaagataagaaacacatcaatcagaacctaatataaatgtattaatatagttaatacctaatataaataacagaaagatatgtataacttaaaatattgaaaaaagaaagataaagaggataatgtaatgcaactaaaatccaagcaaaaattatggctctacgtctacttgttgagtcttgagtgttagtataaactacatatgagtgtctctgtgtgtatgcatgtgtatatctcatgttgtgtagctgtcaaaattagctagaactatatctctcatactaaagcttttctttgttatgagtaaactaaccattaagcctgttgtaactacttagtattaagtcttgtgaggcttggttttgattttgtgatgctaaaccaagatttggtatttacttaaacttttggatttagtagagagagtcatacgttggtgagttatcagtctattgttcaacttaaaaactttttggaccaataaataaatgagatctgaaactcttgaaacccataaatagaagtcacatcaattgtgtcagaaaaatccacaaaacttctcttgtctttctttttttagaaaaacatgggatgataaattgataactatgtatagtctggcacttgccatttggctaagctcatcaacttaaaacacaatttgaaaattccaataattgttgaaccaagtcagattttccatagaagactttattaatgaaatgatctcaaaatatgtcaaaagaaagaaatacatattcatattatatatataatcacaagttgcctagggaaaattctgaaaaaccaaagattattaatgtaataggaacatatttatattatttattaataaggtagttgaagtaacagacagacggtttggaagacacatacaaattggaccaaccaagtgggtaagctgatcctctttttactacaagcatctttataattatttaaaaattatcattttaaccatgtttatattctttaaccaaatttgtttttcgaaaatatgtttatattcatgtatgtgtatataataaaaatgaaaatttacataaatcaaaaagtgagtgacggcgccttttccattccggaaaaaaatgttaaaatgttgagtaagcaagagggttaatgattcgtctctgatattgaacaaaatccaattaactcaaagtcatgttttttccataatttttgggtggtgaataccaaacacttacgaatcatttgctcacatgacattgacatagttacacatattaatttgttataaaaatcttttactacataatcacaatatctcaaattttgtgatggaatcacaattagagatcaccatttatctcaagctccaatattacaattgctttgcttccctaaaattgtagaatttaaaatttatgacaaaaatgcataaacccacgactttgcaattatacttactcacatgttctaagttctaacaactattaccattttaaaaactttctatcgcaatgttacaatacacctattcttttctgtcactttgttcacgtgtttagttttcagtttgttacaataacacaagttggtaaggatatgcttatcatcaatatctttaaacctgtgttaaagtcgctttccctaaaaacgaaatcaaacgcatgattcatcacaatcttgaactgaataaaaaggatgctaaataaaccaaaatgtacttaaacgatcaaacacaaagttgtatcaaaagtaaacacatcactgtcacaaattcaaaaagagaaaaattgatgcaatgaacataaacatcaaagtttattaagccaaacattatttgctaagattcttacatctgttcaaacagacaagatcaacacagtagacataagagtacttgcttagcctctgacttagagcggcgtcaagccaatcacacctgcgaaagaaccaacataactcgtgaggataccgaaacagatggtccgaatttgcgattaaacgttataatcaagtgtgttttcttcgaatgaaaccacaatttttggcgtttgaaacaatcgcagcctaagtcatagtgatagaaagtttaaacataccacatgccaatctcccgcctgcgtttccagtggtcagactaagctcatggccacctatatttgtcaaatcaaagagagtaatatcatatcataacttggcttaagagacatttataagctaggaaagagccatcctttttattaacaattcattagtgcaaccgtgccaattgatgtatcgagacttggaagtaaagtataatggtttaccctttccgaggtcatccttaagctcgtgaaccacaaaggctcttccaacaacagaattaggaccagtcagaggaatctacacaatcaagttcacagtaaacaaaagcttcttataagagaaaatatgagaagcaatatacttcttataggaaaaacatgcgatagcaccaacctgattgtccactattgttgtttctgccacgcctgttgttacaaaaacagtacttagttcaaacaggtttttgattatcgaagacagccaaattgtatgggaacttgaatggaggatgtaaaataccatcggcattggcatttatgtttcccaggtcacccgcatgacggcactcatcttctggagctccgtgtgtcatgttgttagggttgaaatgtggtcctacaagaatataagacaagatatcgtcttagaatttggcaaatcatgacatcagtatcaaaagaatctgccacaggggttttgctattaacctgttgagatacatccattagttgtatcaccaaactcatgctgcaaaatcaaacagaggacataattacaccattatagctataagaagaacagatgattcattcttccgaggaggaacaagctt

SEQ ID NO: 298 - DNA, 93122 bp, Arabidopsis thaliana
aagcttttgaaattaagtttggcataaagttttcttactttaccaaatgatttctattgcatacacaatgttgcggttacaggaagcggacatggcaaacagaagatttctttggatataccgattaatcttgtaaccgggacgaacacaatcgatctccttagtgttaccgtagggcttgcggtacgttctattcgtttttaatggcacaaaatgtttactaggcaggagtaacccaaccaatttatcttacttattccacagaattatggagctttctttgacttagtgggagcaggaataaccggacctgtgacacttaaaagcgctaaaggtggtagctcaattgatttggcttcacagcaatggacttatcaggtgcgttacttgccatattactgctcctacctctggctttcaagtcttaacggttgtgatttttataggttggactcaaaggagaagacacaggtttggcaactgtagattcttctgaatgggtttcaaagtctcctttgcctactaaacaaccacttatttggtacaaggtgatgattatacaccaacaaaaacattagttagattttccaaaatattttgtgaaaactctaacaatcgcttatgtttcttagacgacatttgatgctccttctgggagcgagccagtagctatagacttcacgggtacaggaaagggtattgcatgggtgaatggacagagcataggtaggtactggccaactagtatcgctggaaatggcggttgtacagaatcatgcgactatagaggttcttaccgtgcaaacaaatgcctcaagaactgtggaaaaccttcacagacattgtaagtactaaaccagcttacatcattcagcagaatagaacgcttcctcaagcctaagttatctttcgtaggtatcatgtacctcgctcgtggctaaaaccgagcgggaacatacttgttctgtttgaggagatgggaggagatccaacacaaatatcatttgcgacaaaacaaacaggaagcaatctttgtctaacggtgtcacagtctcatccaccaccggtggacacatggacttccgactcaaagatctcaaacagaaacagaaccaggccggttctttcgttgaaatgccctatctctactcaggtgatattttctataaaatttgcaagctttggtacacccaaaggtacttgcggtagcttcacacaaggccattgcaatagctctcgatctctctccctcgtccaaaaggtctttactcattcttttacccctttttttcttctaacattttcatttccttaaaatttatttatacttggattgtgtgacacggtgataggcatgtattggattgaggagttgcaacgttgaagtatcgactagagtgttcggggaaccttgtcgtggcgtcgtcaagagcttagctgttgaagcttcttgttcatgaggagtgcccggttcctaaacctctgctgatttgatattattttaagcatgtaattgttggaaataaagcaaaatgaaatggaaattagtagtatagttttatggtctatccaaataaatttggctggaattaaagttactaaactatgtatgtgtgtggtaagcactttggaaaagaaaagaaaaagttcattgaagaatcaccactgatacaaaagcaagatacatctttaagcatatctactcaaaaattctaactctctgtaacgtccacgtttctgcaatatgctacgcactacacaaccttgggaacataatatcaatccagaacacatgtaaactatcttatatggacagtgtttcacacaataggagcaaatagatcgagacatacggttactgttgtgtagaacatctaccttgttaccaaaggtgatccacgttgaaccgggcctcatgtgtaagtcccctagcgtacatttaatgtgtagggtgacacaacaatactcattacacatataaaaccgtcctttcagatttattttagcctcacaaacttcacaccaagacgtacctgtctccttcccgtaagaaagagtgagtgtgtgcttatcatgcttatacctcaccttttgaggtaaaatagcacaatagaaacacaaagcaaagtcgcactcaatgcaattgaatgtctcttctgaatccttgcaaactgaacaacgtattttctctcctggtttggatgttagaaatagtggatgcctatgactttcatgaactaatggctcagaagttgtggcgcactgcacatgtagcataaacttacatccttgtttaccacactcatagaagaaaccacctttgcacagtccaatacaagctgagcatttatcgttataatagtttataacaccatcaaatcctccaattagattgagaagatgtggatgtatcgggtgatgtatcttgcgagaaaggtttgcacactcttcgtgaagaataaaatcacattccaaacaagagtagaaattaccgaaatagattggcctgatgcatgcttcacactccttattctcgtcgtaatctctgcccgtgttctcgtcaagtttcatatgatgttgctgatgactaaaatgttgtatgattccatcacttatctccaaaaacggaggaagcacttcttcttcaatatcttctggctctccctcaagttctataccatcccacacattgctctgagtggcacattttgaatgagccgcatacgaacaacctttggtacaaacatagcctccgtaatcattgtcgatcttcttgcgacaaacactacaagaccaatctccttcatcaaaagaaggggtataagctatacgatggaaatgtcgtgatatccttatgagacgtggtaagctgatacaactcttatggatcacaaagtcacaagggggacacatatagagaggacaacttgaatgtgataagccacatgcgttgcaagttaacgaagtctttcttagaaacaacgcaagtgtatgctcatgccacttcggttggtctatatataagattgcttctttcttcgcacaaacgaaattaagaccaaaatcgcaagtccgacaataataaaacatccttttgagatcttcatcgcaacaatagcataccctcgtataactactctcatccaacaagacaagctgaagagaatgtttccgatgaagagagtgtttgatctcaaccggagccttttcatattctttatggttgtcgccatcgcagtttcggcatcgaaaatgtgtaacatcatctccactagaccaatatgtcttccagttaaaaggaagacattcccacttgctatctctactccacgggattgctttgcccttatgagcttgaccttcttgttttttaacgatcacttcaaaattcccattattacccaaaaccacgcatgcttgaggacataaggaaataagcttatccctcttagtattcatagatattactagggagaatatttgatagatgagtgacataaatattggctctggctcgagtgccatagtttgacgaaagaataacctgaagtcggtattatggtcaaagtttccttgagaaaggagtgagatgagatttgagagcggcttcggcatggaatccgaatccatagagtggagtagagagaatatttgagtagtgagtgacatgaactccgactccggcttcggctgcaaatccaaatccattgagctgacgagagacattactttagtaatgaaagaattcatcctcttttcaccaacccaatcaagatcaaatcttatttgttttgcgggagacattatttgagatgtgagcgataggagcttcgactctgtcttcgaatccatagagatgtcgagagaaagattatctgcgtaacgagtagatgatagattttgactttttgaatatgaatgtaaacttagtgctgctctctacatcggtaatattacatctaatgtatatacaagtaataccgacaatctccaagcttacaggctgtccaaatttaaagcactaattaatgtaaaacttactgctctcattattaaaaaaaaaaacactagttaatgtctctaatggaggatatattactactaatagtaatatactatacaattagtatttaaaacaacaatgttctatacaattagtacagacaatcgttagacaatcttaagcttacaggctgtccaaatttaaagtcaacgagatcagatcagacttcttaatctattccaattttaggaatcttccttaactctaaaaataatgaaaacaaaaaacatagaaactcgtattccatgcaattttaggaatcttcatagccggaaaccgtaccctaattttttttggtgtacactgttgtttaagctctttggtaattagacttgcatgtggtacgacgacttccggcaaaatagagtaaaattgaaaactcttaaccactttattaacaaaccggaaattaaaattggttacaaagttaaaaactaaaccgaaactaataaactaatcagacaattggaccgaagtaaaatcatctaaccgggtagggtttaaggtctgatgaatcttattcaattttgaaactccttcacttccaataacacttctcgaccatctgccgccacttccgataccgtcatcactaatcgacgagcttccttccgccgccgccggaaacctaacctcccagcgtctgacctatattaatctcactcccattgagccacttccaatggaaacatcatcaatcgaaatcaacgagcttccattagccaccaaaacccaaacacctcctgcttccgtcgagccaattccaatggagacatcatcaatcgacgagcttccatcgtccgattcgaatgcaacggataacattgaagctgttggtgagaaacggaaacgcgccgatgaagacgagaaaaccaatctcgaatcgtcagacacgaagattactactccttcaccgtggtggaagacgagtctctgttcttactttaggcgtgaggcttcgtgtagtcatggaaacgaatgtaaatacgctcacggtgaagcggagctccggatgaaaccggataatacttgggatccgacttctgagcgtggaaagaaagccaaggctatgaagatgtctgagcatgaagagaaagaagaagacgaggttttgtttactgagcagatgatggaatcaattgatggtgatgaaggaggtggtggtagtgttagtgttgttgatttgtcactaagtaaatgtttggtgcatttacctaataaatggcaatctgatgaattgaagaaatttttaggagaacaggtaaatttttgatcttttagggttttagataagcttgtgaatttagttactgattcattcaatattgcagggagttctatataagtctgcaaagaaaagaagaggaatgattgttggttttgttacatttgagaatgcagaacaattgcagagtggcgtggaggtttgttttgtgttgaggttattttattttgagatgtatcagagaatgttgtatcgtaatgtgtttaatgtattgcagattttggatggaaaaactgttaatagcagtaatttgaagattgctgatgttcttccgcgtacatttgacaagaatgatgcaagaaaatcggttaaaagtgctcgtgacgctgtgactcccttggcttacttgtcttatgctgaccagcttgaacaaaaaaagacttctataggccaaatgctgaaaaaacttgtgaggagctttgtattcttgtttgaattggtgtttatttatgtatctcagcttcaacagactgatttgttttggaaatatggcaggcgaggaatgcgcgtaaagcttgtccaaatgggaattcacttccacaatgggtccttacatcgagagacagaggtaagaaaagtctacatcgttgatgataggattacacttcttagctgttggttggtatagtgaagccattttaattggtgagatttttaattcatacgtttaatccctaggtggtcttgcatgcaacctcgagggcattatagaatcaccgattacaaatggctacaggaacaagtgtgagttctcggttggattatctcttcaggggaagccaactgttggattcagtctaggaagtttttggtatatatactttcttccctgaaacttgcgttttcttcaccttgtaacgggaaaaactaatgcaagatctttccagtgcgggtgtgacagcagtcgaggagcctgtggattgccccaacgtctccaaaattgcttctcaatatgcttcaatatttcagaagtttatagaaaattcaaaattccaagtttggaataggtttcaacatagtgggttctggcggcaattgacggtatgtgtattgcaggacatgctgttatgttatagctcaagcataactttacctaattaaaattttctttcaccttgctcaaaataattatattaggttcgagaggggagaaaacccggcgtgttttcaaatgatgaagatgctattacaagaatcgcggaggttatgcttatggttcaggtttgtgtcttgaatggtagtcgatgtttttcattcagacaactattagttcttgttttaatttctctatctcgtgtgaaactattcaggtttgtttaactggttctgatgaggcagaagtggccactgagtttgaagaattggcgaaagcgtttgctgaaggagctagagcaagctctcctactcttcctctgactgtattagttgttcaggtgattacttttcctcactttctctttaataaaatttgaagaaattgtatataattcagtttcccgctctatagtctaattttattattaaccgcctctattacttcttgcgcagaatcactcaggaatatcaaatgttgcaccacctgatgctccactgcaagtgctggctattccaatttcagataatgggacagatcaggagcaaaccaccaatgtcttgactgaagctcggattcatgatcacattaacaaccttcggttcagcatatccccaacagcattttttcaggtaataactgaaccttcatgatcaatacatttcaaaattcttttgaaaattgtttaattgatttgaaaattattgatccaggttaataccgtcaccgcagagaagttatactcaattgctggagactgggctgaccttggtcccgacactttgctcttcgatgtatgctgtggaactggaacaattgggcttacactggcacatcgtgttggcatggtaatactgtactacttgaacttgcaaaaccgaatagcaccaatccttacctgtttatttggttgaagcaagtatactatgtttcactagttctggtaaccaaaactagaaaagtgtgtacaactggtgctgtcttagttttggttataactttttagagacttgcaggtaattggcatagaaatgaatgcttcggctgtagcagatgccgaacggaatgcaacgatcaatggcataagcaactgcaagttcatctgctcaaaggcatgcattttgacagtaacatatttcgtagttggttccattgtcttaatctgtcttcatggtagttctgttggctttgttgtacaggcagaggatgttatgagctctctacttaaacagtacctagatgtgactcaaatggaagaagctaagcctctaagtaatgctaacgatgatctcaacaaacaaattccctcaacagaagaaatgacaaactcagagcatgtagctgatcaaaacctacctccttcaaacactcaagtggaagaacttcaagacaatgagcagaaggattcctcgtccttagaaccggaaaaaactacaaaaccacagttcaaaaatgtggttgctatagtcgatccacctcgctctggacttcatccagctgtaatcaaagctctaagaacccatccccggttaaagagacttgtgttagtcccttctctaaacactccctaccacaaacttggttacttcgtctctgtttcctctgtttaacacagttgccaatctttgctttgatgcaggtacatttcgtgcaaccctgaaacgctagtggcaaacgcgatagagctttgcacgccatcttttgatgaaccggatagaggaaacaaaaattacagagggcgcaagaaaataggcattgccgctttggctcgacatagagccaagtcaatgccaacttctgaggcttttagacctgtcaaagcaatggccgttgaccttttcccccacactgaccactgcgaaatggtaatgctccttgagaggtaagaatacgaaataaactctttaagagaatgatgtagcaccaaaagaacaagcaacaactatttttgttttgcataaacacaatttaaggattatatatatgtttaagaactgaaacaagttttttatatcaaaaaaaaaaatggctctttaaaggaactctccttcagtaaagtaagtgtaacgagctctggtcatgttatctcttcgtttcttgtaaacaagagctccgattacaatagctcctactccgagtatcgttccaatggctattccggctttctccaatccactcattccataatcttcacctctttcgtcattgagttcttcgccggcagcatcacttgctttgatgtcttgtgccattcccaattccggagatggcgccggagaagggaaatattcggtctctggctcgggatcatcatccgaatcatcgtcagatggagcaggaacaggtgctggttcaggatatgatggagaagaaggagattccggctgaggaggaggtgggggtggtgaaggagaatccgctagggattcaggtttcggtgatgaagccggtgactgaggggaattcgcttctggtgaagaagacggtggcagaggagaatctgcttctggtgaagaagacggtggctgaggggaatctacttctggtgaagaagacggtgccagaggagaatctacttccggtgatgaagacggtgccagaggagaatcttcttccggtgatgaagatggtgggagaggagaatcttcttccggtgatgaagacggtgacaaaggagaatcttcttccggtgatgaagacggtgacaaaggagaatccgttgaaggttcacgtcctggcgagacagcagcaggtgaaggagattcctcctgagcacccgcaaagtcaaaaattaggagacatattgatagcataacaatgaaacagagctttttcgccattgtgatttgataatgtagcttcgagttaatgtggattgaattaagacaccaattgtggaatatcttctctcgttacgaagaacaaaggagggagagaataaaaatggaagaagcagaatcaatacatgtttcgacaattaacaaatatagaatgttattaaaatgtgtttgatccacccatgtctaacgcattaagcagcttcacatttcaaacttggatgcatgtctctcttttttcttttctttttcttttctatttataacacttgtagtttaaatggcaatcaagaagtcatgatatacaactttttgaatacatttttatttttttttgtctcttgattaaatcaagaagtcatgacatacaatccgaacaaatgtagtttttgtgctgaaaatgtttggtaggaaaaaacagttttgtagcatcttgattttcttcttaaaattagttgttaagaaaaaaaattaatagattggagaaaatggatcatctatttattttgaatataccacactggttgtttagcaaaaaaaaaatataccacactggtttgtatcgcaagaaaaatgtataccctagtcaaaaataaatgacgaagaagatgaaaacttctccaacaatttcttttcatatcgttttgaaggataacccatttgcacccattaatgttacagttatgggctaaggcccatactcggcccactattagacgtctccgtctcatcatctcttgcatcggtcgtcttcgccattttattttttcgcgagaaaaaacagaagaggaagcctttcccaatcccaggaaaatcaaacttcgataagatagtttccaccatgatcagcattctcgctcaggtttctctcctcatcgccattctccagattcgttttcatctaagacttgatttgctctatcgctttttaacgattcttctacaggaacgtcttcttggttacactcttggtagcgctttgactggattcatcgtttttgagcagagaaaactcatccatgactccgtttccgatcctaaatctcaatccattgatcaagctcaggttattttctctctatttgtcacaatcgttacaaatccctaaattattcaatttccccagaattctgttaaatttctggattgatgagaatctatatcctacgttagctattcaattttgaaatgcacgacactgattgttcttgagattttatgcagtacattgatatagagtaataagcttcaggtttttacttttgaaatagagtagttggattttgtagggttcttagatgaacttatggttatggtttagagatatattggtgtagtagctttgagttgaagtttaggattctttgtttttccaggtgagtgatcgtattttcgggaagaaatatcgtatggaatttgcgtctctgtggaacaaagctgtggatcagacttttgaacctgcgattgagtatcttagttcacgtaaatggtagagatggataagttctttgctgaaatatgtgcctcgtgaattcgattgttgtcgtgttcttgatgaaaaccttatctgaatacagctctgttcttgtttttgctactttcttgaaaaagaaaattgttgtgttttactgaaaatatgaagaaaagcttcttattgtttggcttaatgattgagatgctgtgaggtaccacttgttatattatgctagatttgatttgttattggtaggtgatcaacatttgatcatactgtaaacagtcagaatactctgttatatgctctattatggtatcaccgtatcagcttaaacacccggctgaatgagttggactggttcacatcagcgtggcaaacacaagttctacggtgatccccgccgcaccattctgcttctagaatcacatgacgtcgatgctatcttgcttttctgtgcttgtgcgaaagctccataaaacctttgctgctttggagagaggcgagcagcgagattcaacacaagggtctaaagtagcaaccggcttttctagttgtgcgtagaagtcaaatgcttggaaattttaggtatatctactttcttctctgaaacttgttgtttccatggtttcttaggaatgttaatgcaagatttgcagaggttatgcttattgttcaagtttgtgtctcggttcgttaacttgaatggtagttaatattgtttttccagcctagttcttgttcttgttttagttctctttcttccctgaaactattctggtttgttcttctggttttgctgatgccaaaagtggctactgaatttgaagaaatggatataacatttgccgaatttcacgtcctctgtttacgtttagttgctcagctgatcacttctcttctcttatttccctggaactagtcatgttttttcacgttggctatttaagcaacagtttgagaaaaaaacatcagaatttttgttcacggtttttttggaacaaactaaaacaaacctaaccaaatggaaaccgaaccaaagtaaaaccaaaccaaaagcgaaataacttcggttagagttcagccagagatttattaaaactgaaccaaaccgaatctaaacaaaaaccaaaatggccagcctactagcactcatggttggaaggacttggtgtcccaaacaaacattaactaatagagtgggagctgagcacaacacagtactaactagagacgaaacgagtctaaatagtattaagaattgggctggggcatcctacggttggaggagtcagggagggcaacaggaggtgcatgtcggtcttctgggaggcgtatggcgtcggctgaatggcacgggacaagttcgagattctcgcagttacagatttcaaccataaagccgtcagggtcattgaagaagagctggtcgatagctgcatctttctcatcacccaccgtcctcttgatgtactttaccttcacctccttgagcctcttctccaaagcttccatatcttcacactggaaagagatgtggttatccattgggtccaaatggtccgtgtcagaaggtaacttatcttggtccttggcctgcaccaagtggatcccaacgccgtagttgaaaagccacgcaccgtcgaagtcgaaagaagctggacgctctatctccacgaaccctaatacctttgtgtagaactcgagagactttttgacgtctttacaaagccttgacacatggttcaacgccattaacggcggtttcgagttcaattcatcatcgcctttcttcttcttctcctccatcagattccgacgagacaaagcttacttcgtatagaagcaacaaagagttaactttaaaaagcgggagcggtggggactaaatcaacgacacgtgacggacggctgaataggaagcttgcatgtgtaagcacacatcgttcacgtgtcactcttcacacaccttcgcatcattttctattggataggtccataaccgtatagcaaaggcgatggcgagtgtcacatggtcatctagactagatgtgtgtttaccttgttgaaaaagtaaaaagttatatctagaatttgggatccattagatgttgaagttaattaagacttcgacaaaaaaaaaaaatagttaaatgaagactagtatagtgcttaaaagcatttaactgggaaaattattgacataacacattgatcacatattcacatgttgaactacactaactcacacagttacattattactacaaagattctacaactttagtgagcgagtaaattacctgacagtagccaaattctacatattagttttactagtctcaacttttaatttgatatgtatgtattttcgatttaatatatgtattttactagtctcaacttttgattcattatatatattttcgaaactaataaatgttacttccaataaatcttaaatatcagttaaatgacgatagtctactaataatattttcattgaatcaaaacatgaatcgaatttcaacgaagatacttttttttttttttttttttggtcaaccgatattaatatacaacaaaaatactcatttgtgtgattttaatagaaataaattatttcaaaccaatagtaaatttttggtttcgggaaataagatgatcgtcaagtacagtgtacaatcggaacattcaaacacgatttcgttttaaataaataaagaaaatattaaatttgcatataaattaagaacttaattttttaaaacgatttcttaacagatcaagcatgcatttgataaaagaacaaaaaagggctttttcaatttaaagtttataatatggacttaacgagttttacagaaaaaggggcttttcaatttaaagtttatctagattttaatggtaatttagaatgtctaaagacatactataattccaaactgtcaaccaaactcttattctcaagatttctaaccaaaccttctttctatagattcaatctactacatagactctatattacacactttaactaaattggatctccaaaagttttatatagtttgggactcaaacttaacccttcaaacacagccttggcgataaagacttgatcacttgaatactctgcttcaagaaaaaagtgaagaaaaatgcacacattcaaactcaaagtcttgctaaaatgatctataatggttcacatcatcaccgcaaacgcaagtccaaagatgattccaaccacaccatgttcttctattccgcttcttgtaccagttgaaattgatactatatcgctttcctgtgctttcgcagaagctccttggacctttgcagcaacgggaagaggtgagcagccggattccgagcaagggttgaaagtgggatccgggttttctggttgtgtgtgaaagaagtcaaatgcagaaggtgaaaatgccactggggtctcataagccaacccgtgaggagctcggtcttgcgctaaggcgaagtttgttaagattagagaagagaagaagaagacgaggcatgttttcgaagtcatttctctaactcagcttctgtttggtttcttgaaagtgtagaaaggttataagttgagtagtgtagtgtatttgttgagactatgaagaaagttggtatttataaggtgatgtgaaataaagtggttgttgcttgggattgataataataatctggtgggtgaaaaagataagacatttacataagggaacaatatgatttctcatgatttctctaccttttcccaacataatttttactttttctctgtttccatggtcctgaaatcttttggttcaatgaaaacccaaatagtcttcagattttgctaaaccgatcttgtttttgaccataaaaactagggatggaccaaaaaaaatcaatccgaatcaaaccaaaattcatcaattcgaactccaatcaaattaaaccgtgtaaaaatttatataccaagtataaatctaaataaatttagtctaacagaatcaaactaaccgaattaagctaaatccaataaatgattttaataacaaaaatatattgaagtatttgagcatctataatattaattgattgttttactaaaatgttttatgcaaaatcaaacagaaataaaattcgtttatattttgtgcttagtttcaagatccaaaaaataacgatgttaaccatgaattataacgtcatttaaaaaatgatactaaatatttttagcttcactgaatttagcatcgcttttcaaaatgactatataattctagtgtcactttaaaagcaacactaacttttttaaaaaattgatgctagacttagatttttttgtagtgtgagtttatactttgcctaattacgaattagaaaatttgagtagctagatctggttccataagatacttaatcacatacctttagttgttagcatcctatacttttttaattaaggcattattaggaagtagtagaatcacaagtaggaagtaggaacaatcattacactttggcaatctataattaaattcaagttcttcttcccttgaaggatcagcaacaatatatattttctttaatatattacaaacagagttatgtgagtgagtgtaataataacacacctgccttggaacacaacatcgatcgatctctaatctataatggcacaagaggggtcaagcatgcatctcttcccttcacgccttccatttatgttgtgagattgagtcttgtatcttacgttatttttatgattaacttcatttggtatgttatgttaagaatattggtttttagtgctgcgtttttatgaaataatcacctaaaaaattatcatgtgaaataatcacctaatggcttccggttgcattagccattcaatttcatatatttttctctaaacaaaaccgtaataatgatttgttttacgttgttttttgatttattaattacctcttgtattcttgattaattgtttcatgtgtcaaaagatatatttgacggttggtacgtaattggttttaattggtttcacatgtattataacgtgactctttctttggctttcactgttcacacacttcacaggatttgctatcctttctgttaaaagtcacctaagatcgaattttcaagttactcattactcatgtgggatccgaattccatttcagcccaaaacaattataagtgaactcacgtgatttttgtagatttactatgttcatttaaatcaaaacaactgcagaaatttgttaataaatacttaaatagaactttaaccaaaaaagatacttgaacagaattgttttttttttttttgttaaacttgaatagaattataggtcatttatttttagcgatgtggttttgaagacgatggtttggttaaattagcaatgtcaaatgtagattgtaaagaagaaaaaaataaccgagtctaaagcgttttacatataaaataaacaaatggtcgagaacttgggtcaaactatagatccttttcattcggaatcttaggtgggagatagcttaaattagatatgtttgaatagtacctagacatctaacatgtatataactacaatttgttcttactttttcaatttagaaaaaaaaaaacaaatcatgtatatcatctatgatgggcaaacatattcaactctcgtttgctattctgattatgttcaccatttttgtgttaggtttgtatttatctttataaaattttaatatattacatatattcgttttagaaaaatcaatttagttaaaatctggttgactagtaaaagttttagttaccttttctcttcttctttttttgtgcaccacttagcatcattcttctaaatatcaattcacctatgttttaattattaatatgtgtcaaatctttttttgttcaatacagtatataattccataatgtaaagttgtgtctcctcttaggccgaatgcataccctagcacactgatccctaaatattttattttcaaattccctgctaatatatagaggatatggtcttatcatattattgaggattattgttaccatcctatgacactttttcaagaagaattagtgaataagaaaatacataatttatgttacagattattttttgttaatagacatgaaactcttcgagatatatatcttctcgaaaaatggataaaatagtatatatttttttactttttaaatattgaaattaagataataagtttgaatcattgttttaataggagcggtgggagacgtggaccaaggatataaacaacagtgttataagactatagatgtaaacctttgtgttaccggtgagtgcaaaaagatgtgtgtaaggaggtttaagcaagcggctggtatgtgcataaaatcagttccatcagctccagcgcctaatcggtgtagatgcatttatcattgttaattatttttttacttacaataaatctcaaatcattcatatgatatataagaaccatgcaataaagtaatgtaatacttcaatggagtttctagcctaaaccatgcaataaagttgtttatcattgagttctttgttacttaaacaactattttaaataatgttttcacatatacattgaaatttgtgatcctcaatgaaatatcctcaaactatactaatttaggtcttttttacatttttagtctagtttcttatagcctttccaactaaagctaaatcttattacaatttaaaaagaggctcttctatatagatagatactcctagatactttggtagggaggggatcaaacttacctcatcaccattgtactttgccttagaataggtaaataaattggcccttaaaaatatatataaagatataaggtggtcgccatgcacaaaagcttgtgatcttgtttagtgaactctcgaataaaaccatcatttcaataacttagatgatgcgattgatttcttcgatgacatgtttcctccctctcggctcttgctactaattcttcgatgacaacgttgcttaagaaacgttgacggatctaaacttttgaaaatgtcaggctaacgggcctaaatgggcctaatgcattggttcagaacatcagaagcattgagaaatttggctgtcgtttcttcgttgacatacgcacacggtgccgttttccagctaattaatgttgctttcaccgactaactattttgtcatctaccaaagttatcgaaggatgagaaaggctttttgtaattaacaaaacctgaaaacgacgtcgctctccaccaattaggtggaagcaatcacgtgccatcacgccacgagtcgtacacgaaagctcttctctccacgtggatcagtgtgatggtatggccacgtgtctatttgggaccaagattaaaaattatcttgttttgtctttttgtgtggcgttaggatgaaattttggcaggtttggaataagtgaacctgaacacacctctcatctcatcgtacaatacattgtctcttgtattttggattatttatgaaacaattacattttcaacctttttacttattgacgtgtgtttgtgaatcagtattacgtgtcacggcttaatgtcaaaatgtataaaatatttttgttttctcaatcctccaaataatttgtttcttaaacatattgaatcaatttttttttttaaatgatagtagaaaagctatacaattcaaaatttacaaatataaatttactgaaaaaccattataatcaatgttcaaaatatcggcctaaacattacctaggcgttcggctagacgctcgaaacaactaagcaccgcgattttcatatagtcggtgaaagaaatcatttctccggttcaggcgctcaaaatcggtttaaatcagccaaatcattcaaaatgttggttaaacattcgatttacagtttttttttctatatctaaattgcgtcgtttggtttagtaaagttagaaaaaaaccaagaaagaatcagactaagacgtgtgcaatattatttaaaatttaaacaatttctaattttttcttcttctttcatctaacttcttcgacaaacagaaactactttaaaaaacattccttgctttttcaataatcatttagtgcactacctcaataatatcctttagatcgatcatatgctttcatttagtcgaattcaattttttctgcacttgtttaattaattaattgttttcagttttatttttctcatataatatggttttgcgttacgatcgactcttgtttaatcactatgctacattataatatatatttaaaactattaaataaataaataatttactaacgcctagattccgtttaggtcccgactaatccgcctaggcgctaggcttctattgaacgcctaacaagcgcttagcgattttttgaatattgattataattaagaaaaaactgaaatgctttaagatgatttaaagattgatttattattaataaaatcggtctaacgattataaaactgaataaaccaaattttcatgattactgtcttaaatattcattttgaaattatgattacttacctattaatttctaaaaatgatttcattttttgaaattatgctagaaaaaaaattatttagataagtcgttctctaactgcacgtccctcaatttaagagttttgggattgaaaaaaatgtaaaattataatttggttatacgattttggtttgtatcaacaaaaaaaatcaacaagcacccttcaatcttcttagtaacaataaatatgcatatcacaattctataattatgcttaaaagaatttaattagaacatagtgacatcgttctctataaaaaattatgtgatattgtaatgtattaaaatgtacttcttaaggttaattttgcataacttaaattttaaattcattgttttttcctaattgaaagagaaattttagctaaatttattggactagtgttagacatggatactattattttttgaacaatgagatgaagattcttacatgtaataaggttcccaaccacaatttcgaaaaaagtccaaatctttattgggatcaagtgttgcaacataattcaccaatttcaaagaaaaagctttaatcatgtgatctaataagggttacaaatgttgtagacttacatttttggagaagtattcgtgatctattagtagtaggtgactgatatgtttggctttctttttctgaaagatcagatatctgccacaataattttgtatattttcatccactgatactccagcatagtagcatgactatattcctcaacgttactctttgactctacaagttcaaccaaaactcttaccttcatttaatttgatttctcattttgaatggcacaaatacagatggtggtaatttagaaaaaatataaacttgttgagactgtgatctataatcatcttatggatgatccaagctgtagacaatagtctcattcctagctaattgttcatcattatcacaaatatttttaattaaacactcattttgtatttctatcaaatgcctgaaaaatgtgcttgtaatttttgagttgaaagcaattcttctccaacattcgcttgatctaaccaattaatcatcttttgtaaatgagtctaatggaagcttagagagcttagaaaatattttttcaatcagtgattttgaaaataaaaataataggttagagcaaatgtatttatattcaataacaatttaacaaataccaagataatatataaagttaattaaagttttcagttctgcttatttttgagcaaatatagtgataataagacattttactttttaaaactcggaaaggatgcgttgtttttattaaaccttaaagtggtatttaaaatttcaaatattttttaaaatttataaacgaaattcaagttttgagcaaatttgtttttaatatacgatagaatgataaataagtataaactgaagtatacgtaacttaattctgctttgtatcctttaaagtgttgctaattgttaacagctcattatttgttcaaacaatattaatttatgtatctatattttaagaaaatttatctataatatataaaagaaatatattcattctaatattatataggaattgacaacaaaaagaaatcacttattagtaatatatcaaaaattgtactaaatttattttttatgaaatcggatccggtatgcttgcttagattatactaatactttataactaataccattgtcaaaggaggaaaacggtgtctgagaaaaaaaaaatctggtttgttaataaattccatccatgtaagagttattattgttttccaattcatcttcctacgaaatttcgaagaaatataataaattgcgttctcttctttaacacatgattcaaatattcacagcgtagttaataattgaataaaccacaagttaaaataaaataaccttttaatcggttgccgtgtagagcccttgacagtcatcgtttcgtttggataaaatcgcaaacttctacgaaatttccaagggcatttccgtaatttcgtagaaaacggtgaccaaaagaaattaacacgaggaggttgaagtctatgtctatccattgaccttcaccaatatataaagaagcaaaacccaaagcctaaaagaatcttaaaactttgcttaaaaccaaaaacaaagtttcatttcttcttcttcttgaaatggcgacgagcaagtgctactatccacggccaagccaccgtttcttcaccactgaccaacacgtcaccgccacttccgatttcgagctagacgaatgggatcttttcaataccggttcagattcctcttcaagtttcagctttagtgaccttacaatcacatccggtcgaaccggaactaaccggcaaattcacggtggttctgactccggtaaagctgcgtcttctctaccggttaacgtaccggactggtctaagattcttggagacgagagtcgacgacagaggaagatttcgaatgaggaagaagttgacggagatgaaattttatgcggcgaaggtacacggcgagttccaccgcatgaattgcttgcgaaccggaggatggcttcgttttcggttcatgaaggtgctgggaggactttgaaaggaagagatctgagtagggtgcgaaatactatttttaaaattagagggatcgaagattaattatcttttgggtacttcttttaaatctttgtttaaattgggggttacatatagaaatatgaggagcttaaatcgaaatttgtaagagctgttttttttggaattattttagtttctggattcacattaagtgttttttttaacttgagattgtattgaaattttgagacaccaaatatgaaaattgacttggtatttcttttataatttttttacttcttcgtcaacttatttcatttttatagtcgttaattagattcttcgctccccttggttatttagaaattaattaaatggagatcatataatatattctacgagggctaattaataattactatgattgtattggagtggctaaagattaataaaggactactataattattagttaatctttttttgtgcaaataattattagttaatcatgtggcataaattgggattatttgccagatggagacatggtgcgttgtctttaatcatacaatgttggtcggcatatgttcctctctgtttttttcttatcggctaattatgttttaagaaagaaaaaaaatttgtcctcttaaatttatattgatcatattgatccaatagctgattggctgatttataactaattaaaaaggggcattcaattattcataatatacgaattttattttatgatagtgtaaacacagatctggttggtacgttctggtatttgtattttcagacaaaaaaatttgcaagggcgacttaaaaatttagtatgatgttacaatattattaccaccttctggataatgagatgttgtttttgttttatctgtacttgatcaatgtcttggatcaagtacgcacaacataaatttaggcgatttatgtggataaatcacctgttttgataggatatggataattaactaattggttacgatttaaacatttaacgtttcattgacgtaacaaattacttcattaggtagaattcttattatatcaaacacctagatcttgtacctacaaattgtttttgtcaaacatcttgtacctacaaataaaacgatatttttacaaagatactaaatttcaacataatgattaaatgaactgatatttttacaaagataataaatttcaacatacgctcttttagtccaagaaaaaatcttataaatgggacagtggaagtaaaaccataccaataatggattcataaatattggtttcaaactttcaatgaagattgtatctacgttcaaatatgtagtatatttttgaaaattttaacgaatcatttgctaattttggaataaaaaaatttcatctaaaattttagttatttgcattattcttcggaatgcttggttgaccatgactagggaagtacataaacctacaccaaatagatgatcggaatcacttcggatatcattgtgacaccttccgagaatcatcttacggtctaactagaaaaatattaagaagagggagtgagggacaaccacatgattcatgtggcatgaggatgatatgttattgttattagatttaactggtatgtaattaattaatcaaaagtataagttgttatttatttttcctggtggatatttagaaaatagaaacttatatcaactaaattagacatcgataatttataggactaacagattatccacttgtcagtctttctcaacacaactaggcttttttccaaaaacacttaactccatcatgttatacgtattaattgtaacatttgttctattgaagtttcgaattaattcttgtgtaagttaccaaacattcgtttaacgcatggcacttggcagagtactatacaagtaagtcaaatccaatgacaaaaacgtgaacgatgttctagctcatttgaagccatatgagaagttaaaaattactaatttgtgacatcgtctactacggtaccaataatggctttttagatattggtttcaaacttgtataacattgtatctacggtcaattattttaggtttattttctaaaaaattaaacgaaccgtgggaagaccaccactaggaagtagataaacctacactatatataagagagatcatcagaataacttggaatattggtttgatgtcttgcgaatatcggcttacgcgatctaactagataagagtatgcaaaggtttaagtagattttattgaggcgattaaaaagatgtctatagattttacctcaacgggattcaaatattagattagtaatttataggattgattgataacatacttgtcattttttccgcataatttatggaattaagggattcaccaaactagtttttctaaagaattcaccacaactagctagtaccatcttgaaaaagatgcatgctggattcctaatttccatttggaaaaagtcatatgcatttttcttatggttatttacctttaaacaacaagaggaagaggatttgaataacttttgttttgacaatggattttaaatttcatctcattagtttgtttccttttatcgaaacacgttattaacttcttttctttttggcgaatgaatcataaacagttaaataagtttgcgtatagccgaccgtaaaaaggaaaccaaaccgcatccgcgtggatattttagtttggtaatggcaatggcaatgtcaatttttagacgtaacttagccagtggcagagtggtaatttctggtaaaagtacctatcaagtgagcccaaactgatgccgtgatccttaagagtatttcccaacgtaaagtgatgactgcacaagtcgagtcgttcggcgttttatgtgcgctggtcttgtcgttttgcattctttgtctttttcctcgttattttttttcttttagtttttagtttttaccaaagcgacgaatcgaatataaatgggtataatatcggtaccttccaaattaaacgtcaaatttcttttcactattctttccttgttcttttgatataaaccaaaaaattcatcggctgttatgacacttcaggtacgtctctttcacgtgtttggttataatataactaatgaattcacatgtccaagaaattgactatagaaacaattacgataaaaaagcttttggttgttggcgaaaacaaatagaaaataagtttttggtcaaatgtaagcaaccatagagaactatgaaagtcattgttaggaagcaaaaatttcatatggagaatgtgaagttcgttcatctgtaagaatttagttgatagaatggatgaaagatgagatttcgagctcaatcgttgttgcaatatttgagtgttatgttgcgattgcgaatggtgaaaaagaaccgcatttgtgacaatagttatattactcaccatatgatcgatcatattgctagtgtaacacaagtcacaaagccgattattcaagctcatcaacaagaacgtaaagaaccgactcagctcaatacatgacacggactacgatgatggattggtgagtggctcactcggccaaaaatccgtaacgtagtcatcaagtttctcaattccaaatcttttcaattacgtaatccaaaaacatatacattcattgtaaaaaccggttttttggttgaatacaatttacattcaattcaaagaaaaaaaacacaagtcacaaacttttttcgatagacttaattaacacagatccataaacataaatcttgattacggattagtgttatttcaaatttctaataactagatgaattcccacgcagcgcgtgggtttgttttgaaaattgtttagataaaaagatgttaattattttatcgctaatttatgtttattatttgtttgttattttatacttagtaaaattagactcatcttatgcacttacatttttattgttagattcatttttgactctaaatatcaatttctatatatttcatgtataatctgattatttttatatccaagattctaaaatttgttcattatcatgaacacaacagaatgtaagatatttggattttaagagttttcatatgaaaagaaaaaaaaagaagcaaaaattaaagagttatttttgtaacactttttagattttatgctattgcatatagccatataagacaaatggatttgttttgaatttcgtggtatgtctaatgtctcaaaagtctattacttgtaaatgttgaatgtcaatgttacgaacttacttaaagatacaaaaatgaaaagacagaatttcatatgataagatatgaagcataacgtaataataattaaaaaatcaaggtaaaataactaaactaatattaggtagcaaacaactaaactacaacacaaataactatttagtcattatagagtgatgaccattgaccattaaattttttaaaaaatagaaaataataaaagtaaaataaaagtagtaattgatttatttaaataaataattttataattttatttttattttgaaaaaaatcatgtaagaaattaattaatggaggatttaacacaatatgagacttttgattttctctcaattaattttgctgattttaatttaatcaatgttaaataatacatgtcattttcttgtgtgatgaaataattttataattttatttttattttgaaaaaattatttaagaaatgaattaatggaagatttaacacaatttgagacttttgattttctctcaattaattttgctgatttttaatttaattaatgttaaatgacacatgttatttttttgtgtgctgatgtgtcacttatatgtagagagtttgtcaactttgatatatatgattacaaatgtactcattggcatgatgaactatgaactatccatcggcttccactattcggcagaaaataagcccaagccccatattaagtagcccctctctcttttcaattatatcctattgggggaaaagcccaacaatatgggtcgcaaagcgggtcaaatatatccgactgaaatctggatccgttggtgaatcgtgaatcatcctcttcctcaatgcgagtggacaaagtgatctagcagagagaatcaatgaacacgtcttgccattagaggagaccaaccatttctctcctctctcttgaaaaatctataaccgatttctgcaatggcgacttcagattcgaggtcttctccttcatcatccgacaccgaattcgccgatccaaatcctagctccgatccagagacgaattcggagcgtgttcaaagtcaattagagtcaatgaatttatctcaacctagcgaagtctctgatggtagccacaccgaatttagcggtggcggcgatgataatgatgatgaggttgcatcggctaacgggaacgaaggcggagttagcaatggaggtttattgcgtgaaggtgtggcgggaactagcggaggagaggttttgttaagggcggaaaatccggtggaaatggaagcaggtgaagaaccaccgagtccgactagtagcggttacgatggagagagaggaagtagcggcggagctacttctacttataaagctgatgatggaagcgaggatgagattagggaagctaatgtggatggtgacactgcctcgcagcatgaagctgcgtggttgcctggaaaacgccatgttgatgaggttagtttgatatagctaattagctctagttttaggttataagatcagttcaagcatcttctcttggtgttatcgttgttgatagtattcagtttccggcatggatcgttgggttatgggttctctaggaatgctgttgaaaatgtttagtgagtgatatttatgaactgatcaatattgattaacttctcatcagcggtagatggaactctgagaacacatttttaatatgaaaacgcaggatgatgcttctacgtcatggagaaagaggaagaagcatttcttcatactgagtaactcaggcaaaccgatatattccaggtttagacatttcttcatattgaatcgtcagctagagaatggttgtattgtggggtttatcgttttaacttttaactgatttactctcgttgcatttcgtttttaatcgttgtatcgtttagatatggagatgaacataagcttgctggattttcagctactcttcaagctattatttcttttgtggagaatgggtaaaatatgcactagctttgtcttatgtttgtttcctttatggttactttttgtatttaacgtttgatgcctaacccatttttttttagtggtgaccgtgtcaacttagtcaaggcaggaaatcaccaggtattaaaatttccctgtactatcaattgtatggcttggtgcattaactttcaactagagaagtgttttcttcatttacatatggcgatattgattagagatataagtcatgtataaagtaaaatcactgctcttaagaagattacaatcattttaaaaatgagatttcctggtcaaattcaggttgtctttctcgttaaggggccaatatatctggtctgcatcagctgtacagatgaaacatatgagtatttaagggggcagttggatcttctatatggtcaggtaaaaaatagtctgctgctctgtatcctttctttgtaacattttcatgtttgagtgagcggtttaaataaccaaaatgcaatattggtgatgcagatgatactaattttaacaaaatcaatagacagatgttttgaaaagaatgcaaagttcgatatgacacccttgcttggagggacagatgctgtcttctcatctcttgtccattcatttagctggtttgtctctaattttcaactctttaaatcaactgccttgtacattctttccctgctatttattttctgaataataatgtggagattgaggctactgatctctagaaaaaattggataatgagcacaatttcactggaattgctagaaaagttttcatggtttcatggatcagtttcgtctgttagaaatcaactatatacgtgtagtatacagggttttaaggtttagttaggtataggagtctgtttatttccttcccagatgtataactgttgttacacacattaaatcttctctctttgtagtttacctctgagcttcaggtaaaaaaggttcttacaatcttcccattttcccatttttaggaacccagctacatttcttcatgcctatacttgtcttccccttccatatgcgttaaggcaagctacaggaaccatattgcaagaagtttgcgcgtctggtgtcttattctcactactaatgtgcagacacaaggtaaaaaacccgtgccgaaaaggtcaaagtttctcagcctggaaatccatcatagttaatgactgtaggtatgtttactcgcaggttgtcagtcttgctggtgcacagaaagcgtctctccatcccgatgacttgcttctactctcaaattttgtcatgtcatcagaatcattcaggcaagtgctaaatattttgtccatttacccaccgggaaccatacatctgtttgtgtaacttgttctcactgctaacaggacatcagaatctttctcaccaatctgcctaccaagatacaacgctcaggcctttttgcatgcctatgtccacttctttgatgtgagtcaaatacttgtaaagagcttcttaaattcatccacagtgcacaatgtgaaatattaacttactcgatggtgtaggatgatacatatgtaatattgcttaccacacgttcagatgcgttccatcatctcaaagattgcaggtaataaaagctatatcatacttgaaggtactcgtgttttttacatgagaaaatgcttaaaataagcatgttattgagttccataaacttgtacatggttagggtacgccttgaggctgttcttctcaagtcaaatattctaagtgtggttcaaagatcaatcgcggaaggtggaatgcgtgttgaagatgtaccaatagaccgcaggcgtcgatcatctactactaatcaagaacaagactcacctggtcccgacatatctgtgggaaccggaggtccctttggactttggcatttcatgtaccgtagtatatacttagatcaatacatttcctcggaattctcacccccagtaactagtcacagacaacagaaaaggtaaaattcatgaaactccatgggaaaccaagtgattagtatttggaatggaaaagtactgatgtagtagttgtgttgcagtctatatcgagcataccagaaactttatgcttcaatgcatgtaaaaggattgggaccccacaagactcaatatagaagagatgaaaactacagtaagttcgaatttgcacacatgtttgacacgaaagatgagaatcttctcgctgcggaactgactaaaagttgattgtgataacttgcagctcttctatgttgggtcacaccagattttgaactctatgcagcatttgatccacttgcagacaaggtgagagattctttaaaactttctgatgaagtcatatatatatagcttaaatcgaagaaatacacggatctctgataatgatactgatgaaatcatatggtaggcgatggcgataaagatatgcaatcaggtgtgccaaagggtaaaagatgtggagaatgaagtgttcttgcaaggagctagtcctttctcttggtgataatattttactattcactctttaatatatatgtatttttttttaatctttctactggtttgaccccctatattgtgctagtaccacccaccttaataaggcaataatgtaattgtacccagaaacccttgagagaaagctatttcattgcctttattgttattaattagcttgaatagtcaaaattgagatgatgtagacaaaaattgaaactatttgaaaagtgagcaataatattaaggttttgatggaaggatggagacgagagttggttgttacttgttgtgtggttttagtttaaatgcccatcactgtggtgctccttcctaattattttatttctaatttttcatttattctcaaattacaaaataaaaaagtttgtattccttttaaaagataattttttacttactacatgataatttgggctatgtgcctatgtgcaagacaattatcatgtgtatatgtgatttttttttttttttttaactttaagcaatacttcttatatgcttaatgacatcagtcgcatagttgcataatgacatcagtcgcataacaaaattccgcataacgaaaaatacatgatgaaataatcaactatatatccacttatttacatattgaatttgtactatttttttagatgaaaaggctgtcatgtgtttagataagtactattatgcaaattttgtgttaagataagtattatgcaaatttctttcttggttaaattcttgcataatcgcatcaaaaacgccagtatgtgttattcattggagccataattcaattctagaaaatatttattaatggttacttcctctatttcactatgtttgtagtttaaagtttttttacacagattaaaaaaacacaagattctcatttaatttatctattttctataaatacatcattaactacacctaattgaaccaataagaaaataggatgtaaaatagaattgaccaaaaattattaaatatatttacttttgcatagaaaaataaaaagaacacttattttgaaagaaaaaaaagttccttaaactacaaatataataaaacagagggagtataattagtttttaacttttaagttttacagagtgatgtattttcatggttactaaactcactggcctatgcagtcagtggttagttcattaccatatttgacaagttctttaatggtatgctattattgttttagatatcttatgacttaaactcttaagcgaatccaagaaatccagattaataatgcctcttcagacaaaatctgaatttgttttatcttctcaagacattacggatgaacaagggattaatacaatgcttctaattaaatgctctgcttaaatgcacctgcttaaaatattatgaccccgaagtaaatgtatttaattacgaagtttatagttacacattaattactttgtaaattaattcgtcattaaataggtaaggaaatggtgaccaagggagagtattcctctcgttttcttccatctttatgtccttaaaatcgttggggttcgcattggacattcatttggatatttatttcttcctattattcctttttattatccgtttgttgtcacatttgcatcttaaaacgtaatggcaatagtaaatattacacatattattaacaacattgttctttataatctaactactcacaatttgtagtttaatgatatctattattactatcgaatacgatataatatactaagtttcagtacaaacaatttattctagctttctgttagtacaaacaatattatgtgcatataatgaaacttttcatgtggttaaatgagttaatataagtcgcaagaaaaaagaaaactagttagtacaaatttatgtggttatgtgatggatcagtcaaacttcatcaacttcgggagattgaaatagaaaaacgaaaacaaatataaaagtaaatgttggccactaagcttaactatgattatgaattccaccttttactactgcaaatcactcacagcgtttattacgataatgccccttatctctctctaaacgtaataagcattttggtaatttcatgatttcacatttgttcctcctctctctctctacccattgacttgtgtggacatggtttcaaaattcatcaaaagctaaattattctttagagatgtgtgaacattaagttttaatatatgaaaataaagtacgcactaacttcttaggtttcaagctgttttctagtattttgttttttcttttctttccattttcatattcctttttattagaatacgacttcagacttcccactaattctatgattaagttaaaattatacatcagtcgaacatatttttatttgttttgatgaaatattttatttaacttctactattgaagaaaagcatatagatcacactattgatatataagaaaaattatactagaaacacatctatgaaattttgttaattttttttagagaaacttactattattttctttaaccaattattttttataaaactaaaatgaatcaatgtggtagatcaaaattggagaccgcacaaataaacaaaagattcaacatagaaacaagttaaacccaactttatagtgaaaaaaggaggaacagccatgagattgaagtttcatggaaccaaggttgtagcctatcaaaaacgtatgtgggttggatagatcaaaattagaaacttttgtttcaaatggtaaaagcagttatttcacaattcatagatagttgaatgctaaaaaaaaaatagagaagatttggtaagtattaaaaatataaaaattgatcggagtagatgtgaatcatgtgatgaccaaaaaagatttgacaaccaaaattgtctttttttttggtgttttatgtattcagccgtttcctaagtgttattatagactttacggtttcgttttctccaaaaaaagtttatgattttttttcacaaattcaaaatgtatctattatacatagttgatgatggaacttgtgcggatttttcaattttttgtttcttttgaccgagatttcaaattacgagttaacgttaaactgagaagtcgcatggattacacattgtttaactagctacacatgattagaacaagttaaaaatactaaacatattgtttttttcgccaaaaacaagaaagttaaaccgttttgacgagtgttgttataacttcgaccgtttcgatgagtgttgttatagattctgccgtttcgttctttccataattctcttttaacttcttctctgttattacaaacgttaacaaaacttaataaactagaattaacctgtttattcaaatagacttatttttttcataccttacaattatacaaattgttcaatatatatttaatcttatgttttatgaaaattcaaattataaagcttacaatagtggtggattatagttaaatgtttttttttgttttttaaatccataaattaagatacatacaaaattagtatagtataaaaaggaaatataaaaatatcacatccatgcaggctaacgttcagttgactagcagcgataaaagcagataattaattctcacatttaattttattttattttttccattaaagcaaaaaccccacactctctctctctcttgctcctccctctcttcctctctctatctctctctgcaaaaaccctaaatttcctccgatttcaccatcttcaatctccttcacaccccaacttagcctcttaatcactccccaagctaaaccctccaacgattttccatgattcgaagatacagagccttagcgatgaagaaaaagccctaaaaaccaaagctttgatctctccgaaatcggagtttctttctttgtttggtaaatttggttttcgaaatgtataagaaccagctacaagagttggctcagaggagctgctttaatcttccttcgtatacttgtattagggaaggtcctgaccacgcgccgcgattcaaggctactgttaactttaacggcgagatctttgagagtcctcagtattgttctactcttcgtcaagctgaacactctgctgctgaagttgctctcaatgctctctctaatcgtggtccttctcactctcttgccgccaggatcttggtttgtttcgcttcctcttactctctttggcattttacttggaaaattgtgagctttgaatgctgaatttgcatgttgttttaggtgctttaggtcactgatgggtttagtttgtggttaggtttttacttattagggtcggtgctgagatctctgacttgctttttagggatttgggtttctgggttgtctgattagagagagtgatcttcacattcactgatctatggatccaaagtttgaatcttgttcttacccattgattggtttgggacttaaatgagtagaacaaataacttttgtgattttggatgcatgtttacttctgatgttttgcttgttgcatgactgatgatacttttcttggctctgttcttttggattatggtttgtgtaggatgagacgggtgtgtataagaatcttttgcaagagatagctcaaagagtgggagctcctttaccgcgatatactactttcaggtcaggtcttggtcaccaacctgtgtttactggtactgtagaattggctggaattacgttcactggagatccagctaagaacaagaagcaagcagagaagaatgctgcaatggctgcttggtcttccctaaaacaatgtgagtcctaattctgattttgtcagttttgatatggttttagtttaacgcaggcgttgatcaaatgtaactctgcttacatggtttgatgttttttatgttcttcttggtaacagtggcaaaagaaacatcaagttcaatgcctgagcctgagaacattgacgaactagaacaggtgattatagcaagagctttgataaactatcgtatcaaggaaaacattggcacaggaagctcctcgagtgccccagttccatttgcaaagaagttctttatgcagaaccttagaccaacaagtccacagccttctcctgcaaccacatcgagaatcttaccctttatttgcccaaaacaaccttccagaagcagcagatcatccttagcagcaacttccggtattgacagaattatggcagcagccttggaaagccgcagctaccagcggcctcagcagagatttgcaaatccgccttatgttcctatgaggcaatttagatcgcaatgccatgggatggctccacctgtcacaatcagaaccgctgtaccggtcttctctgcacctccaatgcctcctccaccatgtacaaacaacactcagctaccttcttctgtgtatgtcccatcgctgatgcgaactgcaccacctgtgaggatcgcgccgcctgtcacaatcagaaccgcggtgcccgtatttgcttctgcgccaccggttagaattagaaccgctgtgaagcccacagttgaggcaggagaaacccgcatatcatcagtccaagaaaaggagagtataccagtcttgcctgatagtcttgaaattggagtagaaggaagtactataacaattacagattgtgagaaaacagcgtcaaaggaaaccgagagagcagagtttaaggattcatcgaaaggagaaccggagacagcaagagagcgactggagaacctaaagatctgatgccttgaagactgtctctgggtttagttttttttgaggttggtttctgaaaattgttacattagtaatctcgttcgttattatactcggtggatcgagtagtttgataatccgaaagatttgtattatattggggagttttgggaagaacctggccatctctggattgtagaattgtatcagtttcgcttcctattcagtttgtttgtgtcctttttctcatcttttataaatctgttacctatcgttgttccagcagaatcaagctctttgtcttacacgacagctatgacacatatctcaatgagtctttggaacttcgaatttctcctttagctaacaaattcagtcaaaatatttcagcacacgagccatatgttttatacaatatagtttttgcaattcagtcaacatatcataataatgcattcaacatctgaaatttcttcaatcatacaacaaagccgaccagatagtttcattgtacaacaaaatgaataaggtcgtcgtctacaaaacaattcccagtttccaagtattgggtttgaagaaagttggttccaaacccaaaacaagaaagaagaagaaaaatcagtcactatacaccgaaaaacacaccatgaaaacacatcttgctgagcagtatcgtgtcaacgggatgcaagagaccagaaattgaagagaaacgaaggcaaagcagcgaaccagcttatgaaagctaatgccgttgatgtttcaaactgaacacagtggttttgtgcgcagctattcagatcgttgtctattagaaccgttatgcctgccgatgcacaagctgctgcaaaagtcagcgtcgatgtcacctgaaataatgttgaaaaatgcttatttgtacacatctcttttctcatacgattttattaaattgagaggctaaatggtaaatctcttaccccatcaccaattgcaaacaagctcacaagtcgacggttctgtagagagcgtttgaccataatggcatagacgtcaaccatggctagtgcaagactccacaagctctgcagaccagtagctgcaactaggtagctgatgaatcaaatacagtaaaccatcttagcagattctaacagtcaccaaacatggtttaatcacataaaagcataaaggtttaacccaatatactacccatcccgtacaatcggttcaactatcacattatgtccacagcttaacactgctactacaaagattcattcatctggactctagaaaatttgcaacaggagacctacatacaaagtacaccagtgcctgtcactaaggcaaacttacctaagtaaccactaccagacaccatgatgcaaagcatgattaataaccaaattaaacaacagtgaccaaatgaaaaacatgatatgatagccattttatcaacattaacttctcgaagaaagctcatctagttaaaatgatctttatgaccatgatatatcccggattagcagctacatcatattactgggcaccagtaataaaatcccctatacacagctgttaactagcttctaataagccttaaagatactaatagactagcaagcctcataacttatcatattaagccacaaacccgatgcttattttgtattgcactttcggaaatggaaacaacaaaaagcagattccagttcatagtgtatagcatattggaagaaagatagggtgctatcacatccgattctgataaatacagattctcacagaagtttatagtaaagcatatattcgatttctaatagaccaaagtcttaccagaaggcggtaacggaaggaaaatcactagtagaagccatgacacaaagagcagcagcagcaaacaagaactgaaaaaaacgcaatgcaagaccaagcaatgttccaggcattccttccatatcatccatcctcacccgaggcggattctctacttccgtcgcagctgcaggaggatcttccactggatgtaccgatgcatggctcacattcatttcttcttcttctttcctccaccaaactcaaccaattcaacacatctctctctcccttcctcttcaccaatagctgaattacaaatctaacaatctactactactcaaatctcccctacctgtattcaccaaattaaaccacaatttatacaatctaatgataactcagtacaaagttcaaggaggactaaatcaaacatagaatcaaatctccgcgatagctaaactaaatccaaggttacgaaattgaactagatttggctccggagaagtaaagagaaaacgagatccaatcaattgagcacgtagatcgagtaagggattggtgtttacctgagagaattaagaagagaggaagaaattgaaagcagccatggagcttgggtagaggaaattaagaaaatcctaagctatatttgagggaagaagaagaagaagatcgtggaaatggtttttaaggtttatgcgaagaagaagaagaggtgtgggtgttttgatcaaaaggaagaatatagcttgacgaaaagagattaaccattaaaccaaatttagaggtcaattaaacttcttaaggggaaatataaccaccaatctatattttcttttgttcacattttttttggtttcctaaattatactttaaaatatatctttttttaagaaacaataccacatatattttttattttttccctttttacattaatatgggtactaattttatttcaaatattatcagtttatcactaactatgatttatattgtagcaatttagcatgcttttttttgttaaactccaaaatgtgatataatttgtgatgaaaaaatttctgtaccaaccaaacgacaatattgcattttatttttttgtcaaatcagtcatatctgctatagattttttaattataatcaaatttaaattaataatataagatgtctatttaagtataatcaaatttaaattaatactgtgtaacaaattttcaaggttaatatagtactttttatgttttatttactaatttcttattatggttctaaactggccaatatttcgcggctttacattctttttggcaaatttctggttggtaaaaaaaaaatttgtaagtttttagttcgcataactcgggtgtcggccttctaggatcatatattaaaagtatgaattcttcaagcatttaaggcttctaagtaaggtatgttcttcgatcagcgacgattaagacaagtagaccatggcggcatgttctcatacaagcattaatttgacagaatatttttctatcgacagtcttggtaacaccaagtagtaaagctagaaaaacagaaacaagtctgattaaaaaaatgatttaaaaagaaaaatggtatactgcaaaatcaaccaaacctaagcccaactagtaatgaatccctgtgaatctgatcatttggacaatgcgatcaaccacaatgttttcattcgcaacaattaactcaattattagcagagttccgctaataattgcaggattttacaagcaaatggatatgcattttggttttaatgtgaagatttcattcaaaaataaaagtataagctaagctattgttacaagagttatcttttaacacatgatcaaaagacagaataataaatttacgacggaaaagaaaaacaaaagagatatataaatatgtaatatgtaactatgttttttaatattttaaatgcttttatcaatattgttaatgattttagtaaaatttatacattgctctctttgattattagatgatgcactttttgtaacaaagttttttttggaataaattttacattttattcaaaacaaaataaggaaaaatattagtattaatcagactagagtattatttataatattaattaaaaaaaattaactgtagaattctaattttatttctagtgtttgcttggaaactacatagtatacaaaaattagaggtatttaaaaacttttgtccttatttatgcaaaatttgcaatttctgcctcgatttttcaaaaatatctgagaactccgatctcattctctctctctttggatctccatcaccattgactgatttgatcgatttcacagctcgaaccccaaaactcgccactgctccgctgctaaggttcttctacttcttcgactacgggcaaaagctctcagtctccttgtctccttcatcgccaccaccatgttctggaagctagcctctctctctgcatcgtctcctgtgagtttcaacgatagattcatttcttctcctttcttatagctgctcagcgtcttccttggtgatctggttttaggaagttggaatggttcttcgtttgcatttttcattcattttcctagtgaaattgatttacctctagctttacacggagattggttgttgattcattgttgtgatgatattgcaattcaggtcaatttggaatttattcctgagttgatgttctttccatttgttatggatataggtggagtcgatactagacaaagacagtttcacattggaagagcttcttgacgaggaagagattattcaagaatgcaaagctttgaatagccgactcattaatttgtgagggatttgccttgtactactttgtttcacatatccagacatactgtataaaacatttcttggaaaagtttctgatggtgtattggtatttgcagtctaagggaaaaaactcaagtggagaaactattgcggtatgttgttgaagagcctgaggacgatgctgatagcaaacgtgctttcaagtaatgtttgcttcttttataatgactggattttcagttttccatgcttttatttgttgaatgtttctggcaatgctttatttctggctagtgatggattcttcttctcgtaggtttccattcatctcttgcgagatattcacatgtgagattgatgttattcttaagactttggtggaggatgagaaggtattttttcattccttgtttttcgttttctttgaatttggtatgttcttatcattctagttgatctcatttgttgggtctaatattattttgcagctgatggatttgctatttggatttttggaaccgaatcgtcctcatagtgcgttgctggcaggctacttcggcaaggtctctttcttactaataagaagtatatataaaggccaacagattttagggtctgccagatgtgttcttacatgactctgtttgatttaggttgtcatatgtctcatgatccgaaagacttcagcacttatgagctatataaaagtaagtatcgctgctttatcttacggtgcggccgtgggggataacctttattgtttcgttttctctctctttttttttgcatcagtctttagatatctttttgcattattgttcatatcttatttcctcatagttttatttcgaatttgggtttactcactgagctttagctgtattgaaacttagatcaaggaacacctttattactatagaactctgaactgatgtctggaattggctgggagtaatgtacatgaaggatttctttctggctacttggtggattttcatcacatactttctatcataagcttgatttgatggttgtttcttttgtacgtagtgagattagtttggtgtgactaaatgattccatttgatgcacctaccaattttgactacattgtcaaaatctggattgcctttttgtgatttttgagaaaaagcttttaataatttcaggggcatggaaatgtgtttagccagttagttgatttaattggaataacatccataatggaggtaaatggtttctgagatcctatttagcttggtgtgacttcagcgctcatcgtttcaaataaacttattgtgatatactgacattgtgtaggttttggttcgcttggttggagctgatgatcatgtctatcccaattttccggatgtgatgcgatacttggctgatagcgatttacttgaaatgatcgtcgacaaattaaatccatctgtaagtagtaaaattttaggttattccaaaacaaaaagagacttgaggctttattttggataaatcttgatgatttaaaatttggtacagtgagaggctaccgaataagaaaaaacataactgggatttatcattgccaatgttttcgataccatttacagtctttttctacaacctttgtacttgaatcagagtcctcctgaggttcaggcaaacgcagcagaaacattatgtgcaattactcgaaatgcaccttcagctctagctacaaaactctctagccctgggtttgttatctttgctttcatatttgagtttcacaggtttttgcggatatatacaatagtctgacatggtaaaacctcttatcttctttctgcagcttcgtttctaggatatttggtcatgctatagaagattctcattcaaaatctggcctagtccattcacttactgtatgtatctctctgttagatccgaggagatctggtgcttcatcgcctttcttcaattcttatagaggtcaaaatatgtttgagtctcctgtcccagtgacccaggagactattggtgccatgctacctaaactcggtaagttggtttccagtgctatagaatcttcccttgaaacgataagatccttcttttatcttaatttgtgccggatgcatatgaatcaaagcacattgcaatgcttaccttttgtgattattttttcagtttctgctgacccatgactctattgctctatttggtctgttccattttgatttatgtggatagtgctaaactgggagttcattaattccatggttgttgggattccttcatagacttccttggatatgtaggaaatatgtcttgcaagttttgttaaaccaaggcttgtcttctcattgtccgtatatgaacaaaatttaatctcttgtgctgcaggtgacatgcttgtgcttctcagtgtaacgtctgacagcaaagtcttacctacaacatatggagagctgaggccgcctcttggaaagcatcgcttgaaggtctgatcctaaattcaagcatttttgacttctgagaagtaattataggtctcttggacatgtttttaatgtaaatatttacgctgaatcgctcgttttttcagattgtagaattcattgcggttctgttaaaatctggaaatgaagctgctggaactgaattagcaatctctggaacaattaaaaggatccttgaactattttttgagtaagctttttactaaaacttcaaactcttgatatggatgttagcttacttgagatattaattaactaaatacttacaacttatgaaggtacccatacaataatgctctccatcaccaagtggagagtataatactttcttgtttggaaaataagagcgaaattatggttaaccatatccttcaagattgcaatctgattagcaaaattctttcatcagacaaagactcggctctttctggcgataacctggtataccatctgcgctttttcttactacggatttaattgattattggtaaatcagctcaagttaagagtcgtagtcttcttgttcagatgatcattagttaaaacaaatgtcttggcatttttcttctgtgatgtagcctaccgtagttgccactgggaaaaaaccaccacgggttggatatgttggacatatcacaagactgtggaataaacttgtccagttgagtgatagcaatgccctgataaagacatcgcttcaggttggtattataaccaaacagtcttctgtactgtagtttgatcttacattagattcattaactgcacacataaaggcgctagcatcaagagtgctcttccttttacttttggtgtgttgctgacgagagtttgctctctcaaatcattaggaaaacagtgaatggaacgagtggcaaagtagtgttctgaaggagcgcaatactgttgagaatgtgtacagatgggcatgcgggtaatttcatcaattttctcccttatcactctatgcttggccccaatttagttaccatcaaattgtcgattattgcatagtcttagatgcttgtaggagggttacttaaaaccccataacgattaatgaagatggagttttcttattcttcttctgcactatcttaacaaagacataaacatatctgtgtgatgaagacctgacaatttacagttttttaatataatgggagtagaaaaatgatcttaaaccaatgttacaggcgtcctactacactgcaagatagaacaagggatagtgacgaagaagacagggactacgatgttgcagctttggcgaacaatttgaaccaagcatttaattacagaatctatggaaatgaggataatgaagaggtattttactgcttatagttgttcttgaaattatgaaacggtttattcgacaccagtttaatccttgtcttatctggtttcaggatcagaatgctctcaatgctctcgatagagacgatagtgtaagtcctgctcacttcttctctcttctttgtatatcgaagaaactatttatatcggttttcatattttatgaaaagatgtaagcctgaaactatttttccgtattcgaaacagtttgttaatagtggatttatcttcatattatttgcaggattcatactttgacgatgaatctgctgaagtagtaatttcatccttgagactcggagatgaccaagggaggtgggtttatggaagattctcatatcggatttaaacaaggtcatcgaataatactgtttttgaaaaagaagacttgatccgttctcatttacttcctgcagtttgctcacaaattccgactggttcacattccaagatgacagattcagcaacccgacctctgacacgatgatcgaggacgtgaacatgaatgaaaccacaaatgctaatgatagcagcagcagtgatgatgaacttctggttgaagaagaagaagacgatgatctaacagagaaatcgaagaacatctctcccagcaatttatcaacatcagactcaacaagcatcaacatatcatcagagaacaacgatgaaccatctgacatgcaagtcactagctccagtctgaacccattcattgacgtaccaatgcttgatgtcaaacccgaaccggttattccaaacagttccccaacatcatctgaaagcagcagcttggggcataaatcgccttcgtctcctgccgtgcgagcactctttgaagaggatgtggagtttgtgggagtagaaccagaaggaacagagaaagcaatggatcaagctttaaaagaagggatagtcggtgaagctggaccgttgaagcgtaatattgttcagaaagttccggaaaacgaaaaccaggcagagaattcgggtgtgacagaattcaacgatgcaaatttctggagggttgatcaagaagttacagttttggagtaaaaggtaaaaacaaccatacaaaatctcgtattgttgatgctctgtttttgcattcttaatttaaagccaattgctatagtttttttttttttaatgtctctgatttgctcgtttgccaattatactactttgggatcatacataccttcatacaaaacaccttatatcaactgattgcagtttttctttaactgattacagttttgttctttagtggtctctggtttcaaactatatatcaatcacactcgcttttaaaaagttaatcctgatttaactttgtaatacgaagatcccaaaaagcgacacactaacaaattcaagagtcaagacgataggcagaagagaagaaaacatcccactatggtctttcttttttattgatgataattctaacttggtttataggtaattgtaaacagttgatgcactcgtttaatgacattgttagttgttatttcacatcatttttgcatgtcatgaccgttttattcccactgagaggaattctttttagctcagcaattttcacttttgttattggggatatttcgtcataaatactgtgtttatatagttatgttttgttttcgacaaaataatttgggccactctttagaaatcctttcaaaaaaacacattgaattatgtatttttttccattaaataaactaataaagtaacactgcttaagtttattagttggcttttcttttctttttttgtaaaaaggcttaaatttttattagttgttggtttctgaaaatgaaaacttcattgaatccttcgtatgagcagaattggtcaggatcaaattaagtgtttttgaatactaataatttctgagttgtacaaatgttaccaatggaatatgacgttattactaaaatagagttttagtcacccttgtattattacaagatttaaaaaaagacacatatacacacgatacgatatttttgattttgagaaaatctaaaaccgagaaattgaactttggaaaatatcgttgacaaaaaacacaactagcttgcccgcaaaatcttttgacaaaccggtaaaagtggatcgaagacataaaggaggaatctagaccgaacgattcacacggacagatgtacaatctaccatacacgtggcatagcatgggagacaatcacgctcaacacgtaactgccatgtcaacctaacaagaccgctccgaacaaaacaacacacgtgtgggtcctaccgcacgaacgcgacgtctgtgcaacgttatcaaagatctctgtctctttctttttttaaaacaaaattttaatgaaccaactaattccctaaataaatactatctcactcatttgtttcgtgcattttattcagttaattttcctccattttattttaaattatgtttactagtagtttttttttcatttcaaatgatactgataagtttttataccaaaatttaaatgtattttattttatctataatttatagcatgaattatgttcattattagttttagttgataatttcttatgttaacaataaattaaataaaaaattataacttttaatctgtttacaaaaaataaatcacctaaaatgaaacaaaagaatatatattaacccattctctcttagaaattgaaccatatttttaccttagaaactgattttttgtttttgttttaagacgatcaaacataaattgttgcatgttgaccaaaagcgaaaaaaaaaaaaatagtatttgcaatgactgtatccaaatattgaaggtttgaaaaacatgaaaatagaagatgcacaaaatggatcgtgacaccaaccaaatcatctatgttaattaatttatatggttggtgaatttgatgttattgacaaagactcaaaatgttttttcttcttttcttgtatatattaatatggtctcggatcttgtgcaagtgctttctttctgtctacactttcgttgatgatgtagtttacttaacattgtcattaacagcgtttgctgggttcactaacctatgtgtctacaatttttgactcattcaattgttttagttttcaatgtctaatttaaatattcgggaccatctgatctatcgggaccttaaccaaattaatggatcattaatcatgattttaatgtgtgtgaaacatgtagctagtttactttgacaaccaaaaacaaaacaaaacatgtagctaatttttaaataaacttctcacatttgtttattgtaaaagaaaagaaaaatcagatctgcctaactaacctttcgggtatgtactctacagactacagataacagtagtttaaaaaagtatatcctaattaattacgttacttattgaaatgggtaataatgtatcttgtcttcctccattagacctaagaaaagcaaccaaattttaaaggtaaacattaaattacgagtcaagaaaaatatgaaaggagatttgcacaaatcttcttcaacgagctatcacatttaatcttcatatccttgtattgctctacaattttcacgctcatcaaccacaaaatgatctcgtttaaaaataattaaaatgatcttgttttaaaaaaattaaaatgatctcgttttaaaaaaattaaaatgatctcggtatatatcaatactatacagactagtacacctacgtttccaaatgacaaatggtttctgtttacgtttacataaactacttcgtttacatcataattcaattaaccattagggggcaaaaaaaaaaaatcatattttgtttaaaatggttaaaaacaaaatatggttaaaaacttactattagggggcaaaagcataataaaatggttaaaaacttactattgtttttatgtaaatcatattttgtttccctctcttcgttgttaaaatggtgagttagagtttagcagatatatttgaggcttttcttcataaaagaaaatatgtactaatgtatatccgccaaaacatgtctcctaacatatcggattatttttaattaagatacttttagattttcttttttttggttaacgttcaattattttagatttttaaaaaatataaagatctattatagatattcgaaatttaagtatttttcccgttagacgcagattaggaacatttatttggattataaaatatatgatagatcagtagaaagcgatagtactatttacaatagaatacaccaataaataaatttgtattatctttatttggaagaatttgcacgaagtaaagagtttttatttcttttattttaattttactcttataccatccattttgaattttaaagtggacaaattagcccaaaatgctcgactatattcacaaaatattaacttttagaacattgtacctttggtttggatttctgaactgtttcttttaagaaagttgaaccaattggcaagtttgatattaaatcagtaattgaactgaaaacaaaatcaaataatgtcagtaggatttttgagaaaaccagaaaaaaactaactgctttatccgattcaaaattatctaaaacacgacctaaattttcagttcttaaaattgttgacaaaaaaattatctaaaatttactactcctacaattttattgttttacgaaatcttcagatttaatgtttcaagaatataatttatattcaaattcaaagtaaaagttcataagttttcttttcattttttaataagactaaaattattacatatttatttttttcggcagcattacataaataaatcaaactttggattatcccaacgagttgaagtaaaaacaaaacagatcccatggcaatcggattggtactgaaaaaaaagagagcaaaataagggaacttgttttgtttgcttcgaaaagcttcgccatttgttgtcttttccgctaatttattatttcttcatctctattctccatactgtatatgttttgaccatgtgacttcttcaactatcttttctgtcgtttttattttttgtagtttcatatatacttcctttctattaatgtattctctataataataaattgttccaaaaactacaacgtttaggtttgttacacatttttattaattattatattaatgatgaaatatagattttaagataagtaattgaatactagtgcctattggttcaaagttatgaaaaacttttagtcacataacaaatcagttttttttttaatacgagtaaaaagaaaatacattaataaaaaaacatagaaaatataaatcaaaaaaagaaaaaaaaaaacattgttggagaaacggccaaatttcgtgatttgtttttttttcaattagtatcaaatgatgtcgttagactaaacaaaaacttctgagttatgattgtcattattattattacttttagtctatatagtttatttgatagagacaactatatcaatcgttaggctataaacacccgattcattattttactactttatcataaatctcttattattgtaaataataaaatcgttaagggcaatgataatagcagtaacactttttagaaggagagcagtaaccggctcctttccccctcttcttcacacacatagagtcacactctgcagcaacacagttggattgctttagaatctcattacattgtttttttggttttcctagcccctcatttgccaccactcctgttaccaaaatatgtatgaaacataaaatattaatttgtgtatttaaaatggaaatttatatgttttcatggagatatacgttttgagaatatactaataaaatgtctaaaatataaaagtctttgtccaagcgaccaacagaataggcattcataatatatatgtgtttagatccattaaatattcttgtcaaacaacataagattattactaaagcataacaactatgataataatttgaaaatataatataaatttacaccacgactattttttaaagtttagtacaaaatagtttaactcaattttttggttaggtctaatatggatcatatatataaggctgaattcaatattatggaaagcgtagtttaattgatatttcaaagagttaatatgacattctttcttctagaaaattgtgtaggatatattaagatgataatagatataaatacaaacctagcacaagaatggtgaagataatcataacagtgaacgagagttgaatgagtttcttcatcatagatgatataaatgaattgactgtttttaaacttaaaagaatgaacaaaataagttttttttttatatagtttttttaacttaacaaaatgtggtgatatttataatcaattggatgtttctattttaagctatatgtctgaatttagggatctagtttgaccttaaatatttcttatataggttagaggcttagagctttaaactcgctcctgctttctccttcactataaatattttttaattaaattaaaacaacacactacttatatatatatatatatatatatatatataatctgatgaatatatatgtatatgagtatagtatccaccatcggaaaagaacaaaaaaaaaattaattttttgaaaaaaaagaaaaaaaatattatttgaaggaaactaaaaatgcttatatataaaaatatatatatatatatatataatcatatcatgaaatctggaaataatttttatataattttttaaattatgatgcatttattattcatatcaaattctatttgtatttattctattaaagcatgtagcataaataaagatttcataaaataaaatgtggtgatatttataatcagttggattttttctcttatttagatatatctatcttaagctatatgcctgaatttagggatctagtttgacctaaatatttcttatatgataggttagagctttaaactcgctcgtgctttctccttcactacaaatattttcaattaaattagaaaaacacacatatatatatatatatatatgtaaaatctgaaaaacaaccatattttttgccaatgtcaaattatatacttttttgggtttagaacctcatgtaaatatgaatgacggagctagaaattattgttgtgtaggtaaaagaaaaataatataaaataatattattaattttgtttagaaataatctatctataagaaaaatgaaatatttacctcaaaatcaaccaaaatgaaataattgtatacattatacaagaataatatttttgtttcaatgtatgtggatttttttattccattagttaaattaattttgtatggggtcaaaacctataaaacattggattcattataataattttaaagaaaatatagttgatttttcaaaatttataagggtcaattgacccccataatactatgctacttccgcccattgctacattagacttgaactgcctaagtgattaagctaaaatagacctatactatcttataactaatttttcaccgtgttaagtatttcaagtttgaataatcaataaaacaaatataagaacaaaactactatttttgagacgaagagggcacaagcaccaaaacggcggcagaaatgggaccgcacgtgagatggatggacctagacaatgtcatgtgagggacccagtgggtaatgttgtgttcttttttcttcaatttcgagctcatgacttctcctttgactttttcgacatcttcaccgagacagtcaagtttttgctgtcatgttttcctcatttcagatccccaaatcctttctttaatttttttctaattatcttccccaaatttcactaattatgttgtctcgtcaaattaaactgtaatataaacgatcaaaagaagaggattatagatctaaaagccatcaagatttggtaatatgtatgaacttatgatagagattcgataacaatttatatatatagattaatacataagtaaatagattccaagtaacctgtgagtaaaagtaaaacatatcccatgaaacattgtagatattataatcattttctgtttctgtcgatttttaaagattcaatttcttgttctcagcagaaagttgtataaacgtacgtgtgtgtgaataaaatagtatgtggttaattttcaaagcaactaactttaagtacaaatgaaggtatcttaaaccaaatatttaatagatcttcctctgctattgattgaactaattaaatatggaggcagtgaaggaggagaccaaattatgaaattcatgtagatccgatggacaattaatatttatttattttcttgcaggaaaattccattaaagtatcggtgagtgaaatttattggtgaatattctcttacaagaaatatgtaaaacaataatataaaaataaccaacagtttagggaagcttttgaaacaataatttagctaacagtagctagcacaaaaaaaaaagttagctaacaagacaaaataatttccacttttatcttacaaaaaagttagctaacaagctacaaaaacaaatttaataggaaaatttgtttccattaaagagaattgaatgatataggctttttgttacttagttcatagttcaacacccaaaatgtgaaattatatgtaagcaatttttatatactattcgtagaagtgaaccataatacacacattttactcataatagtctcttcttcaaatttagcttttgctaggtattaccaagtgatatggcaggttctttgattatcatatacaacttgcaaccaaaacaaataaattcaaataccaattagagtacttttggtaacacttgggaatggtttgttacacacaaaagaccagcaaaaaaaggatttaaaatagggaaaaaagagaattaaagacagaaataaaattaggttcaaaacaaaggccactgcttattcctcaatatgcttcaagttcaagcgaagatgctgagcggaccagtcttcgtagaagcgtctataccattttcaccagtcctgattccggttatccacgtcctatgcaaacccgaaaaaagcaaactaaactcggtattccaatcggtatataatcaaacccgaaatgtgagcttgagatagacttactttctcacgttgtcgccaccaatatccatcttgattgttagccgtttagttgctttcatgaaatcactgcatttttaaaccggttaatcaatcaaatgacgataatcgcaaacaaacggttaattgaaagaattcttttgagatttttacctgaaaggttcgtctccaatacgtttgataacaccatttgcatcccggtacacaacatgagtcaacaaatccgacctctcttctatatgaaacatctcagccaatttccggtacaattcttggtacgagccaataaccgagagatcgagtgtgcgtccaacatcctcagattccatgaaaactttacaatgacccgtctcaagtccttgcaaactataattccatgttaacccacgagccactaaacctttctcctcctccgcttccgcctcttcttccaaaaaccgttttcggttcataacttgctgttcggttaaaatcggttgaccgaacaacacgaactgatgagtcttaaccgaaccaacagacttcttcttatcctgaaccatagcaggattccccatagttaaagaacacgaaatgttattactattctcactatccctagcctgataatgatgatgcctcgggttgaaactcgatagaaacatcgccggagaatgtaacttgttgttaccggtgtaactactaagattgagatcagacaacaaagacggagatggtgatccgaagagttgttgagcttgcctggctccctgtattcctgcaggagcattattgttgtcgtttgacagataacacatggactcgccaccgccattgttggcgaatcccggggagaaaatcgggaatttagtaccgtggaatggaaactcaaatggctgcggaatcctaatcttcttcctcggagagaatggagataaatgtattgtaggcatgttcgataccaattcgactaaccacggactaacccgcttaacgttttgtaacaaatccggttcgtcccaagctacctataacaaccaatataaccgtaacattaacaaacaaacatggattctgttaaaaggaagagactttgagtaactaactaacctgaaggagacgccatggtgaattaggccaacgaattggatcagcgacttgaacggcggagacagtacccataaaccaactgattctagaagaatcctctgtttcaaacgccattttaaaacgcataccactacaccatcttatcctcattgctgatctaacatcagctgcttttacgcaaaactccggtgtactagcgcgtggataataaacaacctcaaacgcttgtccacacgctgcacgcgccaccgcttccgctactgcttctactctaaccctccctgtagccgcggcgtttccgtcgttgtttccgttgcgtttcatcatcattagcttcgatgttgttgttgttgactcgtcgtcacggaggaaaccggagaatccagggtaaggattgtcggatcctgcgttagatccgagaccgccgcgtttagcgcggcggattccgacgcagaggtcaccggattcagaacggaggaagacgattgagtctccggcgattagtttcttctggttaacgaaagtgctccaaccggtggttaggagatgacggcgaggtgttcctctgtaaatatgccggaatttccaagtctcgccgtggatgtctttagcaatcacggtttgaaccggtggctccgccgagtaatcaagccgcgggaaaatcgtctcggcgcaataacgtggaacggagaaaccaccgccgttattagcgtcagactgcgttaacgttttagcgaaagacgccggtttctctttaccgttaccgttaccgtcagaagaaggaggagttagacccaaaacggcgtcgttttctagatccaagtcgtttcccggaagtggcaaaagcgtaattttagcaaaaacttcgtctgtttcagcgtcggcgaggaacttcacggagacgacacgacagaggataagaggtggaacgcgcggcgcgtgaaaatcaggaggcgcgtgagcgtgctctgtgtggccttgagcgaagtaaaaaaccgttgaattcagtgaagggatttgaaccattgatcctgcacaagcatgccatagttgtggatccaagcttttctcttgctccatctagacgaagttgtgtaacccccaaattctttacttaaaaggaaagatcaatactttgttaagtttcaagacatgaacatcaagttcttgtcttgagcagagaagaagagagagagagagagagagagagacaagaacggtttcaggggaaatagagaaagcgaagtgaaagagatagagagagagagagagattagagtttaaatttgcagaggaaacagtaaagtttcgacttttatgattttgtttcacttcaaaagaggtataatagtgaagggggaaaaagctttaatggctgatcagatcgtagaagaagaagagagagatagagagagatgctataatcaggtacggacaagaccatcgtaataaataaacatcttgtttttctctttagtaatgatgtatacagaaacaagaaccaaacaaaccagagagattatctcaaacacaaactttataactctttttatttttcatttttttaatataaataatatataataaattgttttcaagataaataaattttgtttttttgtttgattaaaaaaaactgcaactaacttgtttgtttcatttgttgcttcactaataataataaaattagcaatttatcgtatcacgagccgcgataatttgacatgtaccaacaaatttttgattttttactcgaaaaatcagaaaccatgcttgaccagatacaaacctaaccatggttaaatcttttttatctttttttttttactttctgcttttcactttgactcttttttttgcccgttagtgaaagatgggttccattacacgattgtggtaaaacaagaaataggttaaacccatggtaaattatatgatgttgaaattagatgccaaataaacagtccttttttgtactacactggggtaaaaactatgatatttttaacccatgcaaatgtttctttttatttaaatgaaaaataaatagttgcatattattccctcatttcacctcatttcacaataaattttcttttgataattttcacacaaaagtataaataaaataaaaatattcattagttgactattggttttcttcttcataaagtgttcatttagatttaaagttaaattctggagtcaaactttttaaaaataaaaatttcttctagaaagatttttaatttcaaaatcaattaatgaaaaaaggaaactaaagaaaatggattatgatccacaactttgaaagaattacggagatgctcgaatatggtggcagatactttagcaaaacaacatattcctttgaacaacctcttttatttttatgctttcgttccacatgtaattactgatcttcttcatcgtgactatgtcaccgctcgtcaataacaaagctaatgtttgatgaaaaaaaaaaatagaattacggataaataattatttaggaaggaaaaaaagaataattatgagttgtgtaaaatgacgtcataaaagtggggataaaacgtacgtgggagtaggagaagggggttgacccgagagatgaaaacgcggctgttaaaaagggattgtggagattggagtgtgagtgagttcgttgaagttttgtactcgtcgattgttttgtcggatcaatattatccaattataacctgacacgacatacccaactcatccgtatattggtccttttttctctgcaactattttaccatcaaattatatttactcataacaattttaaacgttgattggtaagtgtttttgttgtatttatccttctgtatagttagaaataattcaaaatttgtgtctcatctttagaaattagtttcataaaatctagaaaatctgtttctttatattttgaaaactagattttcctcgtacgttgtctattttagttgaataataaaaacaaatttgtgttttttttgcttcaaacaaaagtaatataaggaagtatagcttactaacttcattagaatattagaaattaattatataactcaaccaaaaacttctaccatcgaagaataataactcttaaagtccaaattaaaaagatttccatctaaggcctaagttttgttcttaggtgaggcataacgtcaatttttctgcttccagtttaaaactttaagtcgttccgaaaaaagaacaaaaaaactaattttgcatttgtgtttgattgtgaaaaatatgtttttttaaaagtagattcgcaaaacagattagtcacaaaacagctttacatgggttttcagttatgtttttctatcttaacttcaaaaatgataagttaaaaaaatacacgaatctctttttgtctctacaacaattatttttatttgagaatattagctacaatattaataaattggaactattattatcttctataattaagtcacattcaacgataaaggattcatacgaactatattaatattcgtcccttgttttgatattaaaaagtttgaaaaaaaatagtcgtatgtaggtaataaatttactcctttttaactatacaaacactaaacagacaacttaagtatgtattacttctattgaccttacttctattgaccttatatgaaacgaagtaactaattttttttgtctacttgtgaattttaagagataaatcacatgactattctaacgtaaaatgtaaataaaatattgtttaagttcgttttcaaagaatgagcaaacaaaaaatagttaatagagaataaatggaccaggagggaagaagaaaacaaaaggatcaattaatgcatgacttctgaaaaaaacataaaatcatcgacaagacacacagtttctttgtctttcaagtgtatttcagccatatactttttcatcttatctcgaatacacacactggtatacatgtaaatgtgtatataaaatgcatatataattaatatgtggacttgacatggctagaaagaagcaacacaaaattagaatggtgaataatgtgttggtgggttgtcttgcattatgatctatgaatggtccattggtcctatgactcctccctatcctatcttcaacttgttttttttcttttcttatttgtttgttaaaaaaatattaaactcctttcccaaactctattacattacctttcctgatctatgcttaatggtctatttatttttaagctgtctatgcataaaggaaagctttaatcacacatacaaacaattaatggttttctctttaacattcacaatatttttctatacccaaacttgtagagaaatttgtttttcagggatcgattgaacaccccctctgttcaaaattagatgttttattttattagatgtgttgtagcatttttatgtaaagtttaaattatttaatattttgtagtcatttatattatgtagtaatttttataattggttgaaatgttttaaattaaatattaaatatttttttaaaaatgcatagttttaaagaaaacatcttacagaaaaaacagagagaatacaaattatgatgacagtatttcatttgaacggttggacttgtacatttatccgagatgatacactagatactgaatcatatagaaatacacttgtatgaccaacccattcatcaccaaaataaacatttcgatcgctatacaaactgttgacattcataaatttcccaacatgaacttggttactctatttttggtcatattgattatgtttggacttttgagctctagactacacaaaacaaaacgttaacagtttcgttaacgtttaatttccattaagatttgaatcaattttacatatatttatttaaaaaaatacaaatgctcatctacatcaaatatactgacatatatgaatatcccttcttttattttttggtacatgattaaaactatttcacataatttaataaaatatagaaattctataaaacatattacaatttatttacatatatgatctttaatgttaactttttgagagtagacatctataaaattataaacgtaaatattaacattgtaaaagataaaatttcacaaatatgtaatttatgaataccaaaggtagacctgcaaagcaatttgtcctaccacgagattgttgaattgaaaacggacacaattaaaacaaggatatgtgtagcattcaaaaaaaaattcccacccaactaatcagaaatctctttaaaattttcatttccatagttggaaataataattattttctagttagaaaaataaatttgcatgctatttttttcactcaacaatttgcatactatttggtagcaaaatattttagtatatatattgcacttgatgtcatactaatcctatgggacaacatgctagttagaattaatataaatctataatttcaaattagtattttgagttctattcatattagaattgctatgtcacatcttttggctgctataacctcataatgcatacgtcaaagctagtaaacacaaagtcatttgtacatttcaaacaactaatcatgtatgatcgatcaattttcaattctaacaagtctttatttagagagagagagatggttgaaagacatgagatatgacaaaagggaagatgggtgtagttaagttgttatgtcactgtccgccaaaccttccaaatcaaacagaagcgtcactgctcagacaaccaaaccaaaccacccaaacgtctctttccatgtttcaccgtcaactgcttaaaatccacattaatttctttaaaaatatatatattttttccaaccctcacaattcctttattggtcaacaaatcccataagaaacaaaagtttatgtttgtgataaatttgggatattgtcaaacccatcccctaaatgattaatttttgtgttttatgtttttgctaacgaaaacaagagacatatcaaatcaaagaatttaagttatagcttgcttatgaaaagataatacgaactgcatgtgcattctaatcgtgacattttttttgtttttattattttaatttaggtaaatgctcgtgagatttttgttctcacctgcaaagagaaaacatgatgcgtatgttcaccaacaaaatagcatatatattttggaaagtcttctttgaaatacacctcatacacatatattttcgggataattggtttagaaagatatttctaatccgaaaggattacgaattaaaggcctaaaactttttggtaatcttaattaaaaaggattcagacttttctcagtagaaaatatgtgatatttttctcaagtattatttttggcaaattttttaattttattagaaggcaaaaaagaacattgtcaactaatattatttgattgatttgaaagtgttttacacaaacatcaataatccaacaaaattggacttttaggtcatgaatcccaaatctagtgacatcaagtaaatatctctttgtcatcaaaatttttttagaaatagttgtggttatacatacatgagagatgcctaatccatgccattataaaagaaaccacattttcagatcatattttgttgccagtttttagagaatcttaatttggatgggacctccaaaaacattggaccagtcttttaaaataattagtttcattaatctattaaaatatacttctgacaaaaaaaaaaaaaaaaaatcttttcatttgtagttattctggattaattagttaaatttaatcattttagctagatttatcttttctcattttaatttttggcgttaatacgcaaattcatcaacattgttttttcagcctaactcaaaatcatccaatttgatataattgtagacgtagaaaagacaacactggcttataaataaataaaagtgggccaaaactaaaagggtttgggcccaaacgataaggacagagcgggactatattgcgcctgacgcgtatttaaaacacacactgttgacgactcattaacttacgctcgtgacagctaaagacaactaaactgttaaacacttttattagaaagttgacctgttagttgctgacgtggcactattttgaagtacacgtggcatcatcgtgacggcttgctttgtctcccacgctaagtcctttctctatccttataagttgaaacatgattggccaactgattccatttatatctttatatatattatttttttgggtccactaatctcttggtttgttatttttctttctaccaaatatgattaaaaagattcttagtactttagaatatgagaatggtaatagattctttcttttacattttttgtcaatcttaaaatcatattatgatgaaattatgatttagtgtgtttttatttataattaaaaggttttaaactgaaacctatatatcttctagatccaaccaactttaataatttatacgtattaactgtgactcgagttttttatatttttggttttagtgatattaaaatatactttttttttgttaaccagatgaattccaaaacgaaatccacactaattttgcgaggttcatagaagaaatacgagatttgttgccattgaaaaagtttacaaatgactaaaaataaattgaaatcataagtagaagagtctaactatgctaaataaataaaaaaaattgaaattttcaaccactaaaccaccacttaattactaaattggtcgactttatatatctgaataagaatgcaagttattaccatactatttttttcggggaaaaataaattattccaatagctctcaacaataatcgatgataaaaaaagaacacacacacaaataattgatgataagttgggtcatgattattgatgttgtctttattttatttttcttttctaatgatgcttttgttttcactcaactcttaaatgatttgttttttgtccattaactctagaattgattttccaaatggatgaggacaaatgagggaagagacgtaagtggggataaagggacctacgagaaggagaaagacaacgaaatctgaggaatctatgtcgttatgtcttcagattcagatgacaccttctctttcatttgtcttctctcatcttctcacttttctaatatattatttcttatgtgtttatttttctctgtaatgtttgacaagaaaaaaggttaattcataaatatatgaagagatatattttatttgtctaaaatctaaaattcacattatttaggaaagtagattacaaatgtttaattttgatgtgttgtgttccaaaaacatttatagaaaaatataacttcgccacataaatgatggttcgataaatcaaatgcaaaaaacaaaagaatagtagttatatagtgcataacaagcgataaattatcacggtgaaaaaatgtttatataaattataattggattatctaaagaattactgaaaaatagaattgaagattttaattaatcgaataaagtatgaataaacaagaagtaaaacattccaatttcgtagatcgcggaagaaatatctcgtggtaagtcatggtaattaaatcgaaatcttggtaagtctctctgataatttttactgtctgttcctttatttgtccccttttcttttcatagagaacgcctctgatgtttccttttaatatttgagatagaaatcaatctttgcatattcttttgatatttattcatttagaaaatctaaaaaggattcgatttattcttacaatcttgagtgtctttaaggctttgtttgtgtgataatatagtacaaagagaaaaagtaaaaatgacacagaaaagtaaaataatatggttacgttgttcctcaaatagcttaacaaaaaaagaatggcattacactagctactcttatccaagaggttctctcagtaatccccatgaaccaaagcgggtaaattagtcccctttttgtgatgagattcgaacctggatctaaaggagcattacattatgataaaatagatgtcagccaaaacatctttcaaacataaccatataaattaattaacactaagagtctaaaaccttaaattttaacaaaaatgatagtctctgcataaaaaagggacaaacactagaccctagtatttaagaacatcagtctttgagagaaaattaaccaattctacggatcctgacaatcttgtttttcattgaccataactcattggtctgccgaagttacgaagccttgatctagtctctggtccggatgtctcagcacggatctttctggtatcaaactggtcgttatctttcattctcatatatatgatcttcttgtgcaaatttgaatgcacggttgggatgaaggtcgggcttgctgctggacggtattctaaaacaagacggcccgatctaaagcggattccacaagcattgcaaagggttttacgcccattaggtccttccctccactgcggggtagtggttgtctcgcaatgagtgcatttcaagcgacgactcttgttcttcttgcgtttcttcaaggcggaaatctcagaagattcagattcatccggagcaaactgctgtgacatctctaatagaaatgatttgaggaatgtaactctcagtagtgtggggcgtttgcgcttgcttctgatgcctttcacgagaaaggccagtttctgatctccgtttgggttttggggtgagccagaaccgttggtgttcttgaggactgagactgggcttaaagattgcaacaactttgagactttgacattaggaggggagttatcaacagtagagaagacttctgaagaactcgactgcttctgcacgcacaaaatcaaagacaaagaatatgagttcaaacaaagaaaaaacaagactccttcagacaaagagatccatacacttcaaccacatatcaacttagtggacccatctagaaagtatacaaacaaaacaagcatgattccatatagatcaacaaatatcatataagattgacaatgatactactatgcctaaccattcttatgttatatatatatatacatggatagattttgagaacaactttattcctctctcaataactacactaaccatatagaagagagacctaaaaatatccttgccacaaaggccctaagccattacacaaactcaacacccttacctctattaccacatcccagttgccaaactggaaaccattcaaatccatgtacatttgactcaagataacaagctaaagtgaaagacctaagacactgcacaatcctttttcttgtatactttcaaaacttaacataaacactcaatagacgcattacgctagtactgcacaaaataactttcctcttgcaaatgcatcatgattgtgtacacatgttgataatctagtaaagcaataactgatgcataaagagtaaaaaaataaatgcatatgcaatctacattagtagcatcgataatggacgcaagcatgattctttgacttttacactcatttctaacataaagcagcaaaaatctatggaacttgaatccaacagacaatataccaaattctttcttaatgaaataaatattgtatacatgacctaatatgtgtgaatgatcaagtaacgtaaataaatgaagttcagatacaaaatgatgcactttcctaatgcaaatatgagtaattctttttaacgcaatttcgaaacctatacgataaattcaactgaagcttgaatccaaaagaattgctatttttaatatgcacatatgtgattgtgtgaacaatatatcaagttgcatcaatgatgcaaagtggattccctttttctcgcatttttccaaccttatgagttatgtggtaaaaaaactattgaggtttgaatctgaacaatgatgtaatatattatactaaattattgccctaaaaaaacttgtgttgttaccgtgtaaaactattttacgtaatggaatataagtgtgattattattctacgctcttatctaaccttactcgataaaaagctatcaaagcttgaaggggaaagtatatttctgttaattagacctactttcctaactcaaatgcgtgctgttaaatatggcataatgtaataagtaaaatatatagagacatggttcgcttgcacgcacttttctaacttacatgcagggaaaaatttatcaaggcttatatctaaaagaatatgttatattatacatataatactggccaaacaatgccgaaattcatacgtgcgcagtgaatgagtaaaatagtctatcaagtaaagcatgatcatttagttttacatgttttctaacataacaaagtcataatgctaaatatgaaatctgaacataatgcaaataagaataatggtgatttcatagagactctatcaagtgagatgcataaataaatgtatatacaagcttaagaactcaccaaaattggcacatgcttctgaacttgcacacgctgtccattgcaagtgaactcataggacaaactcattagctcatccaatggtggaggtacgagcttttgaaatttggcatcccaatctccctcatcatcgccggtctctatatcttctacagaaacatcattggtaggatcaacgagattatcaaggaaattatccggtagacccttgaagtcctcttcaggtaaccacaaatcgttattcatttgtcacccactgtacaaaaaatcatagacaagatatagaaaaaaacataaacatatggtataagagtaagaaagcaaagctaagtttcagagatttcaattgaatataaatgcgaaaatcgacatcaactcgtgaattgattaataacaacggtctcgttgagtgagaataaacataaaatatgaagactacagtttccattagctcacttaatatgttgactcaaaagtaaacaacataaacatataaaagcaagaaagccaagtcaagtaacaactagcaaatatcattttcagagatttcaactgaataagaatgcgaaaattgacataaacccgtgaattcactaataacaattaattaagaactgtttggtcaaatgagtatacctaaaatatgaagtatgactatattcaattaccattagctcactcaatatattgactcaatcacgtaccagaacataaattgaaaaagattcattttgagtcaatatttctctataatttttaatttattcttacagatattgctgagaaatttaaggtaagaaacatagaaaatttcttcattttttaaaaaaatattcatttcatcattgaattcaatctcatctcgagaaatcataagaacaatctccctttaacattttagggcacacaactaaacaacaaaacgccagataagaagaatcaaaacaaagaacagatcatgttcttcttacatatgtatcacgagataagaagaatcgaaacaaagaacaaatcatcttcttcttacagttgtattattgtctcataataaaaactaaaaacaaaaaatctccatttgaagaaggaaaagaagagggtgagataaagacacacgaaccttccgagaacgcagctgactacacagaacacattcccaagcacgaacgaggaaaaagagagagagagagaaagagagagtaatttgtccgaaactggagatttagggattttacacagaacatgaaatagagagagagagagagataaccaatgtgtggtaatctacatggaatttgcagtatgtcatctttactaataaaccttgtttgggaaaaatgaatttctaaattttatattataaaatttgcaaatcattttatatgtatgaaaggaaataacttctgtcattctaaattggacaaagattaatggtgggatttctattcaaaggatatatatattaagcaattaattaaaaaaaagattttatacaaaactttttctgtatttcatacaagtttttaatatatacctattatttcttatcagaggaaaaacaaaaagaaacaaaatacagctattattatcaaaacttatctgtaacattgatattttcactaatgatttaggttcaaaaatattataagctaatcaaatttcatcacaatatgtataagtgataataaaaaattacaatatatctaagaaactcaacagaaatttagtaattttttaacttacttctttttattgttgtttgaatcatagtattttataatttagaaatataataaattagtattctttaattaaatgaaacatttaccttgaaattaactatgatatgagattttatttgtaagagtttaagaaattacaattgggggttataattcactaccagaaaactatcacactttttggttattagaaaatgcacaaactaatttcgccaggaaaaaaaaatagattgtgttttttatttcttctgagttccttcatttccgtaacggttgttaatggcgttaaccaaatcttcaaacggtgttcactttatttacagaaaaatcctttaaaaaactgcttattaaatatttgccaaaaatacctgaattgttatgttgttaaaaaaatatctatttgtccaacaaaatatatatatatatatattaattaatttacccaaaccgacatataatctcatttaattacaaaatctgaaccttaatctttttttataaacctaaaacgatatttaatcttatttaattgtaaaatctaaaccctaatcgttttttacaaacacaaattaacatttaacctcgtttaattgttaaatttaaatccgttataaatttatacaaatatttaacttcaattaattgtaatacctaaacttcaccgtcttttgtaacttcaaacagattttagtggcatattagattttaaatttttattaggtttagattttgattagttagaaaaggagagatgaataaatgattcactgctaaaggtgaacccaaatatttttagataaataaagatggccaaaaaggagatttactctttataaaaattcaaaatcgacttgagatatatctaatctgatgcgatcaccaataaattaaacaaattaagaagaattgaattgtttctttgtaatgtcgaatctcatcatatggttccaacttccaactttcaataaatccaacttctgccaactacattgtttctagataaatctcaaatcgattttgagtttacaaatgaggttaaatctttttttttttgtgtatccatttattttgtttcaaatagattcttttgttctcaaaacaagattatttttcaaatttttttttttaatttaacaagaattgatttccttataacatttttgtatacgtgtccattttaccgatcctcaaattttacttgaaaatttttctcctgagaaaaaaataagaaccggacacaacaaacacaaatcagttgtccgtcataggcgagaactccaaagtctctttaagaaatggatgttaacggataaccgtcagatctgaaatcgaaaacaatcaaacggctaagattcacttaattttatctttctcattttccagtaatattataaataccaaaaatccctaaaaaatggcgcaaaccaaaagcaagagccgtcactctcttcttcttcttcctcgtcctttaccctctgcaaaaaaattcactaaatttagatacgtttgttattagattcgatttttattctctgcttagatctcgtgaatccaaatggagcaagaagaaccatgtgaagcgaaagaaacagcttcttcttcgatagagccgaaaacaccaaaccctaatgtcccagattcgattcctgccattgattccgattcttctctttcggaagaagaaatagttacagagaaagacagaggaatcgtcactttgtctccactgtgtaaacagaggattgattctgcttcgatctcggattgtgttttggtatctgatgacgaaattatagagtctctttatcagaatctgttgagagttattctctcattgcagcagattcaaagtgtagctgttgttcctgagatttggtgttttgatggttgtaaaacaccgcctccttcgtctcggaatctcgattcgaatatggttagtgatacttgtcctggagctcctatgaagctcactaagatatctaggaatattgattctggattaagaagaaaactcttctgagtcttgagtatctgacatggagttaaactgacatgacttgtcgttgtgttgtagtaagctataagagatttaggggttttttaaactcttatggctcttgtgatttgacttttgtttgtacagtcttgttaggctttttatgtgtaattgctagctaaagctagttgttgttgttggagacattcagtttctgttctttctttcttgtctgtaatttatcatgttcatgtttcctaagaacttatgtatggtaaggaatctttagaggtattatctttgttgatatgtcagagctttgttgggtgtgctcctttattgattggtgtttgtagaaggttaccactgaatcaatatctttgctctacaagtgaaactttgttgtgggataaggttgtgcatagatcaggcaaatcggagctatgaagcaaatagtgcagggtttcgtccatttagaccagtctttcgtgtgcatttgggtgatggtggaagccaaaaccgaaactcagaaagtactgaagctagaaaatcaatgcttaacatggagttgtaacaaataaatctgtgtttaatatataaaagaactaagtctataggtctatacaaaggacttcagcagtatcaccaagatcttatcaatggagttgttgcataagaagcgcctaactgtgtctaccacacattcaatagaatttcaaagaatagtttatctgaacttttgatctttgcttggtctttcatggaataattgaaattgctttggaagcgtcgagatggttaaaccgacatgttccaagaagatattctgggagctcctcttcggtattcgcctgcacaaagaagaaattgctcactcaaatccaatgcttcaatatgtaaccagaatacccaccgaagttgacttagatttaaaccaggaaagattggtaattagtttacctgtattaagaaggccatttcaatcacgagtttgttgaggtaaccaagaacaagactcacaactcctcttgcaacagttgatgacccaatatcaacgcccagctgaaaataacaggtgtacaaaaaaataagattttctaacaatgcgtggctcaaacgtgaaaagtcacactgttgtggtagatagatactaattcctgttaggatctagcatcaatccttactgtgttacctcaatatagttctttcccctgaagtagttgatctccagggcttgaccaataaggcatgctttctttcccacactttgcttaactatccaagagccctgaaaatatcgccaaaccaaaagtcaggtatgaatgcattggacagacaaataataaaactaaatagaggtaatcttttacgccaaccttggatatgtagggaatgagcttgaaccttgaattcctatatgcgtcatcaccattaacaaagctaactagcaaaggatgctcttcaataggagtgctcatcatgtaataaagcacaaggctgtacgttgttgatccaggaacctattattccatcgaacaactaattgattcttttacggacacatggaaaagctgaataaaaaaacattggtcacaggagtgtcctcttacctgtatattcacgatgaaaaagaactctggtccaccttttgctgcatatttctgcattttaaaaacttgtaagacttcttataaaaagtaagagaggggctaataactatcagaacaaacaataataatcaaaacctgaactatgcctcctggacgggaccccaaatcatcttcccgcttgtcagattttagccagtctgcagctaccatttccatcagtgtaccctttgccttgacctggatccaccacaagagaatgtttacaaattgagtaatattatacatattgatatattcaagcacaagttatgagcttttctttaccttcttctggtcatcaagataagtttttcctcgaatgagaaaagtagatgggtccgttgttgtccaactacaaggcaaatcacaactaggatcagttggaagcgtggttccatagcagcaaggcgggttgcaggtagcatgtgggctgctctcttccttcgccctctcatgcaggtcaacataacccctcttttgaactgctcgagaaaaaaattataaccattaaaagacaggtgaaactagagaagaagaaaacagaatgagaagacacaactaataagagcagaatttctccatgaaacttaggatcacctgcaagatcgtgtaattttttcactaagctcgtagcgctatttagttttggctggcgggattcctgcagtcggcaaacagaaaatcagaactgttatctttccgagcaaattaaagtcctgtctgatgttgctacctgacagcatgtatccaaatcaaaatctgaggtccagctgtcatccaaattgtcattatctgatggttctggaacgtcgaaaaactcatccaagtctacaaggctagagcgctctgagggaaatttgtctctctcttcatttgcagtgtccttaaacatttcgttttccctcagggaagaatcaccaaacacaccatcttcgttctgagtcaatcttgcacttcttgacaactcccctgacgacagattaggaggaaagcttccgtgctttgccctaaaaagctctctcagggctgattcaaccaacaaggatgttatgataaaagaaaagtgcttaaactgagaaattttcctttaagagaattggcaactaccagaaattcttccaagcattttcacggtaatagatctagctaaggacggcttcacataagatctccaggacttccaatcaacagcaagcatgtgcttcacaactgattgttttccgttgtctatgggagaaatcacataaccgccacctgtgatacataggagaaaacattagttacacagaagagatcaatagttgcattagtgatcaatatgtattggcctacatccacagatatatatattcttttaagaaactgaaacaatagactattaagagtataaagataactaagtttccgcaaacaccaaggtagttgcacgaatgaacatgtaaggaaatgcagaaactaacttcttttttaatttaaatctaggcgtacattacttttaaggcacgcacggacatagcctttctgaggtggacacttcttgtgaaatacagaatgatagagaataactgcgacagaaagaacaaaggagaataaaaagttagctaatggaacatttggcagaatcaaatgaatagttatttctatttagtgctacaaaccatatgtgccatcgtcttcccttctccagtaacgccgtagcgaaaaatctcttctcttcatccccctgttactacagcatgttagtattaagacaaacaaaaacactaactctggcagaaagttgagtagcagaccaaggtaaccaatcgctgtatagctgtttgtggattatatcagtgtgaccatcaagatgttcgaccacactgccttgataaaaacagaaatcccatctgcaaagtttcgagaatttagttcaggaaaagtaaacaatacccgcatttgtttatgttctacgattgttaatatcttaggcttgcttgtctggaaagaggcagtagtacttactctgatcttgagggtccaagagaaagaagcgtttggaaaatagtttctgaggttccatcaacaacaccaacagccataatagccggatgatcatcccactgtgaagtcatgcaacaaaatcatcaaaacatgattcccttcaataaacccaaaataccttttcaacagattaagagtgaaaaaaataccgacccttccgagagaatctctctcttttgcctctttaaaaagccgaagacctgcgtgcaacacatgttaacactatgcattccagccaaacaaaaatcaatgaaatttgagtatgaactataccattctgacaaccgaatattgtccagggagaaggcgcaacaacatcagttgtaacaggatcaactcgtgcagacgaccgaagtgtccagtcaatagagtttgagtgatggtcccgcactgagctactcaatctgatttcagaaattttctttcttaagtaaccacaaaccattatctgtactacgtaactaacaaaaattggcaggaactactggctcagcaatttatttaacagttagcttagagatgtatccaattgattacgtggaaaaaaagaggtacctcaaagagtcccatcgactcctggaacaattaaaaacatctccaggaaaaggggcaccctgcataaaacatataactataagtctccaacctccaagaagagctcttaacttgttactaattgccatttatataacctttaaagccgcctctttaatcaaattaatccaccttgctgcatcctcaggactgcttgctcctaactatataacaattaaaacaagaaagcttaacaaatgaaaaaaagagatgtatatagtgtaccaacataaaaacaaaacaacagaaattaccttaccttgagctgatcattgtgatttgatgtattgtatagtgtaaatatgaagaatgcctacaagtattccagacaaaccattaaaacaaaagcataactaaactccacaactaaagatttaaaaatgagaactttcatacttttctatgaacattttctctcccattgtcagtaacacggatacacgaatctatcaccgcacttcgtccagcattctgtaaaaaccaaattcagattctactaaaagttaaaatcctaatccaaaatgggagattatgaacaaccaaacgaacttgcgattaatcaaatggtggtgaccttggttttagaatcggagatagacttgaaactcttgagaagatgatctccaaggacaaagtaacgttttctagagaaatgcaatccaaatcgattagatcgtattatatacaaccaaccttccatcttcgtctcgctctcattttcagacccaaaagccattacaactccaaaaccaaagtcctagaatgtatgaataagagaaaatcacaaagctttacactttaagaaccttagaagtttcttgaattccaaggaaattgcccaataatcaaatccaatcaaagaacacacaaaaacccagaaaacccagaaaatctcgaaaccctagaaatatcttcttcgcaataagaaaaccaaaagaagtcttcttgttttctccgttttgacgatacaaaatcaacccattaaacgacaaacccagaaaagagaatcagaagtagaggaagatgacgaaggtagtggagatcgaaatttttaaaatttggaggacttaagatttgaattgatctctcgtcatcatcatcactttttccaattttccctgaattttttttcaacaggtttctctgaaattgggagtattttttgtaaaagtgacaataaagatttgaggacgaatgattacgaatttatggaaatgacgttattacccttttcgtgtttattgatgtgttcaaagttttaaccacatatattttctgattggtggtttcgattttgtccaaattcactcgtttttgccctttttgatatgataggccttggcctggtctggccttatagggttaaaatcggttttcgcttttctagacacatcgcaactgttgtaaatttgtaattggtttcacttttgctttaagctttattgtttaaagacaaataaaaattaataaaatcctactatattatttgggaagtacattttaaaatgtaaccttaatttttgtaagtaattacatgggtataccattagaaataaaattttaaagagtaaattaatttatctctttaaagattaaaaagtcaaatactaatttaattaattaaatttaattaaaaaacgaaatatattattaatttccaaaaataataaccaatcaaaattaacatataagatttgatatctaaattttaattaatttaatttaattagaaaaacgaaatacattattaatttccaaaaaagtaaccaattaaaatcaacaaattagatttaatatctaaattatcatattaattttttattaattattatagttcacttctcatctttatatgattctatttttgccgaaaaataatatcatcattataaacaaataattagagtttttttcgcatatgccataatttaaatttttaaaaacgaatataaactgttcaatacatgaaaaaatattataacgggagaaaaatagatttaagaaaactttctactgagtaacgaatcataatttgaaatagttctattcaatttcacacatattatattgaaaatttataatcttatatactacagtaattaataacatattagatgtgattcaatttttaatacaagctggaaaatcgtaaaatggacggatttagatcgatattaatacaagatgatatactacaggtgaaactcttaaattaacaaccaaactacaagtgtataatcttaaacactaaacaatatagataatatcaacaaaacatatacaactcacagtttactatacatttaaaatcaaataaaataatatcatatatatttaaatcatctttacaataaaagtttttagtttaactaaagtataagcctacctgcggtatactgcaggttaataactagattatagggtttattggatctaaagacgggtcatcaaagatctgaatattcaaatatctatctgttaccaaattataaacaaataagttcgtaaaacaatttaatattttatatacgaaatcaattaaatcttaatcacataaaaattagcacaaaaaatgtattcaataattaaaaaattatcaaatctctgtgttatataagttttgatactatattcgaataaagtgtaatatatcttttcaatttgtattctttaactaatttaagctaacttatatagttgctaatcttatacctatcaaaaccgactatcgtttcttatctctatagtatttttgcaagacttttttggtggatttggataaaagtgcattcgggtcatatggtacagtctcctattaaataaatatggtgcactcatttgttattagataaaatgtttagattataattcagagtcatgtcattaataaaattaatattaataaaataaatggctttttggcaagacggatttggagggacgggtttttgaatcaacattaataaaaaagtaaaatataattaatccacaatttcaatacggattaaatctttaatttattatattttaagaccactaatattaaacatatcaaatcatcctaatttagaaaaggttatataaaaccaaaaatgttatgtggtatgtataatgttattatatataaaattaaactataaaatataaatgtattagagaatgatacaatttgcaaaacttttatatataaaaaataattcttaaattttaaaaattactatttttaaaaaaaccacgggacgggtaaagaaattacagaacgggttttattttggaattgggttatatggtagatgtatttgaatcaatatttataaaattttgaaatatgtttaatatgctgttttaataggggttaaaacttaaaaattttaacaattgtctcatggattcgtggtatagcgttacttaataacaattataaactgtaaaatataaatattttataaaattaaaatttacaagttttaatatatattactttcaaaaaatgaagatggaaaactggagaaataaatttattagagtgaatgatgataaactttttttttcctgttaattgaagataaatcctcaccacctgtggaggagttcaaaactaatctctgggtagataaagttttttaaaaaatagttcacatgtaaatttttgtataaatcacatatttaatagatttagcgtggtacattgatcatatacaacattgaagtattaaagtaactatactagagtaatattaatttttgtactcttttctcggaagtgagcttgttgtgtcttatttatcaatggttaatgtgcaaattgcatcagactcttattagtattcttatcaaattttccaaatatctatcttctccaaagtggataaaatagtatcttgcttttaattttaaaatactgatattaagatattatgcttgaaaacatatggttttaatgggaaagtggcacaattttagattatatgtcactcagtggctcaaaaacaaacaaatgaaaagtcatatagctcatctgggtggtttgtacccatcaaacactactttgttataaacgctttacaagatatgttattgggtagaaaatcaaaataaacatatcacaacaagaggtaagacaaaactcttgggagcttaatcacattcacatacagaaactacttatactaaaatgcaagccatagttttactttattttgccaactcctaaattaactaattcaatatgagtggagacttaaaaaaaaaaatggctaaagaaagtgaaaccaaccaacaaagacaaggcatagtctctgaaaacacatggagacaaaatagtaatcttgaaaaataagcattagcgttgatcgattgagaaatatgtagaaacgtatcacaacatcgttggacaaaaggccaaaactgtagtaatttgtaggaataagtcatcatcatataatttgtttaaaatgatttttagttggattgttggttgttgcaaacaagttggcctattgatgaagattgaagaccatttctcatttattattattatttttttttttttgtcattcgtaacttgcaagtctcacaaccactagtttttaattaaaaaaattattcgcttttaagggaaagtttcattgccaattctctttgtaggtccataagaccataacataaaaatgttatacatatactattcatggaaagataaaacaacaacgacaacgtagcatgtgaacagaggatgaattctcgtaaacgttagacgtaacgcacatgtaatatttaacaatatacatatctatatgtatatatgttataaattgcatttaaattttttatatggaaaggaaaaataagagcataaagcatttcaattattagaaatttctggttcctgttatcctaaaaaccgataataattatatgcatatgtcaaatcgcccatcatttttcttccataaactcaaaaacttcataatttatcacattttaatcaccgaaaagtccaaaaccgttttgaaactaattgtattttaaacactatttagtactatactattttattttatcttcttaatagaaaacaatcatttgatcatttgaagaacactaacataaaccaaagaacacgtacgagagaaaataattttataatccttgtaagatccaaaaaggaggaaatgaaataggaaatgtaaatataaaaaagaagagaaaatgcccattggctatttcaattttttctcaattacaaaaacattatcaatgaatgaacaaaaaaaagggacacaattatagagtcgaaacataaagaaagagttattgtactatttcatactggagaatgcttgtctaatttcttggcttcatgatggttctcattttcttgtcccaaaagcggcgtcgtatctctatctttcccctgtcaaaaaaggaataaaaccaaagtacttagaaactttcaacactcattatttctatcttttctttttgtgtggttaacgtacaagaaaagtggaatcggaggaggcttgtttggatttagaagcaactgagcagaagtaggagtagagaagcatcccgaggacagcgatgagtattcctgcgatattacgaggagtgaagggatcgtgaaggagagtgtaaccaaatgcgagcaccaaacacgttttgagatgtcccaagacttggtatgtcaccggagatgtctttccaatcactaaaaacgtactgaagttaaccgaaaccgctatcaaacacgacaacgttatgaacccctgcatgattcatcattgtcaaatttcacaaaattttagtatctatctagggacgttatgatacaatcatggctcaacatgggcacggctctaaggggccatgcgaaaatgggctggaccgatccaggacaatgattctaattctattttaacaccaattgggaataaatggaattaacgatgtaaaaaattaccacgacgatgggagagtaatggaaggagaaaacattgaggctagtgaggtatttgtcgacaaaaggacccgagacgaagagtatagcagcttggaacggggctgattggtataggagttgtgttgatgtcacgttcagtctcttctggatagtgtttgttagcttcaccacaacattttcatagtcatattaattatactatgtattagttattaaacattagtttaatgaaacttaaagcatacaatttggccgacgcaagttgtggcaatggcaaggagagatagaacagagccaacaaaattgagctgaagatctgtgattgatgctataccaaccccaactagcagcaaaaacaatgagaattttatcttctggctgcaaaaccaaaatatgtcattcaaaaaaaagttatttatgtaaacaataaaaattaaaataatcttatgtatcaagtttggttcacctgaacttcttgttgaggaagagggtttctaaaagaacagtgaatggtatgatagcaagtttggtcatctgccattagttatggacaaacatcaaattggtgaatcatataattgttacatgatcaaaagtatgtcgaagatatatacttgatagaagccgatggaattaaagccgaggctgagattgaggagaccaatggaaatgccattgaggaggccaaagagaacaacagttctcatgtctattggtttattctcaaagaagtttagtttatatgccacatgaagtgtgcaatatgttaccatcaaatgccaactagtaagtgttgttgctgtaacaaaaccatagcaaaaaagcgatcaatcctaagacgaataatcgggtttttgataaagatcttacaaaatatattctcacaaagcaaaaaaaaaaagtactagtaattaccaaaagggaaaccaagattggtcatcaaagctttgttgcaaatgacaatggagacagaagatgcaactgatagaaacaatgctccaatcacacccatttgcatactcttcatctctcccattttttcttcctctctctcctctcaaatcttcaaatctatcaaatgaagagagagaaagagagatatatattgatgtgagaaaaagagaaggattgtgaatgtgatgagtgatgaaatgcaaaggtgatataatgagatttttattatttgtttgtataaaaatggttggtgtctaacaccaaacttctgttcttcctaatttcatgttttaataattatgacatttacataattacgcacaagatacatgagaaaaactataatgatgttgcttaatatttgtttttcctcataagagacttctactaatgatatgatagcaaattcttaaccataaaaaagactctgaaatgaaacagccaatggagggagacattgtatggttttctatggacaaacaattgacttgaactaaaagcaaaaaggaaggtgaaactgaatttctcatactttttctattgggcaaaatattgtaaaatagaaactaaaatgaaaattgaaattatttggatttggtgtaaagcttcacactcactccaaagtccataccaatacccttctcttctccttaatttctctaccatttacgttacctattgagagcaaatataaaatagccaatttatgaaattgggtgaaatagataaatcatgaaactggttataagtcttgttttcttattgtcttttcagaagtcaaaaagattatgtaataacaaccacttctattacacctttgttttctaaagttttttttttttacatgtttcacttctctcttgtttagtgaaagcaatttctttttaaaaacatctaagaatttgaaatggagaaagtaacaaacaacataataaagctcaatcaaaatgtataaatcttacacaatatcaataaaaagggcttcacacatgtcctatgaaaacctaatttagtgtaaaatatttgatatacaaaagtaaaagtttttttaatatattaattatatagaaagaaaaaagaaaaacaaatctaatctttcaccatcttcccaagatactctttatcagcatcagccaatcggttctgaaacattgtccattccattttgcatctatctctcactccttgccatggagctttcccattctctgactttccttgacttccaagtgaaggtatcactttatgtattatccattgcgaatccacaacaccaatcttctcatgagcaggctgcaaaagcaaaacacacaaattttcatcatcagtcaagagaatattgtgttattaaggtaagcaaggggggggcaaaaacaacttacttcaacgcatcttctaagcgcaaagtcgagaccccatccatgaaccagatcattctgcatcagaaacataaacaaactgatcaaaacaacaagcattattttgatggactaagactaggactatgtatctacagatcgacgaacctgaatcatatgccacacacatcgccatgcttctcgagaaaatacaggcgccattatttcaacaaacctgtgagagggaatttttttcagaaaactcagtactgacaatgactaaacactcttgagttgctctaaagagaacgtttcaaagagagacttacgcggcacatggaggtaaatgtgggtctttacaccatcctggtttctcttttgtatctctgttcaacagtaagtaacaacacatttcttaattcagaaccaaatttgaaagaaaggcaaagaagaatggttagagaaggagatcttacttatggacttcccggtcacctctcctctttgtcatttcccatgtgagtccattgttaggctctaagcctggttgagaaatctctaaaccatgcttcttaactaactcaatgtacctgaagttttaatagaattccatcacaaaatgtaaaatataagattgttctgctacttcagacaagtaataacttacttatccgcattgaaatgctccactccaagatcttcatcccatataaatatgtactcataagctgacacaacatcaggatgcaaaaacctcttcgcgtaccacctgccaaaaccagtagagaatttcgataaaaacatactcgacaaacatacttaataaccggtaaatgaccagatgactaaccattttgtttgctttcttgtactaatatgaatcgcgctcttcgaccactcaaattggtcccattcagttgtccggccatcataatggaagagcaaaatttggaaatcttcagaaaactgaagatatgacaagaaaacaaaaaatctgagtgtatccacaaagaatatataaaacaatacttgctaaaacacatgctgatattgcagaaccttcttaacaactccattaatatggttcctctgctcaaatccaactgtaaatgtcacaagatattttggcttcttcttcaaatcctgcaaaggttattgttttgacattaactattctaatggccttcagagataaaaccatatatattgagaaagtaaatatagaatgagaagtcaatacttcattaggttctccccataatctacgcaagtaaaaatcagttttcgccacaacgattcctggaggtagtagttctgcaccacgcgggttagttggaacatatatctgcaatcaaacatacagaaacgatacatttcatctgaaatgaggcactattctagaacataatcgaaaagctaacgaaagggaaccgaacaagaagtttattatatacctcaggaaactttcttgaaccgaaatcttcaggggatttgtcaccagatatggctacatcaagagatgatataaggcgcgagggtaagttaatctgcaggaatacgaaacaaaattcaacaggtgcaaaaatgaaagggacacataaaaggacctatgaaaaacaaaactcataccttaaacgaaagtgaaggtaatgtgataccaataaaagtcccaaacactatccccaaaatagtagtaataataacctttgcattttcattcgttcttcgaggagcaccactgcaaaactaaccactaagtagtaatcttcatattggaaaaaaaactcttttttttgtattacaatctatcagttaaggaaattatacctgcggtgcattgttcccatttagttagaaatatctccaaacactctagtcaacaaaattgagtcaccccaaattgtaaaaattcaatcttttttctgcagtagcttcaaaacgcaaacataatacttcagagaagatatatatcacagtgataactaattgtaatactgatagctaaaacaaggctacatcgaaaatcaaattcagcataaaagagatgaaatcgcaaataaatcttgaaaataaaaatgagattacttacaggccttacaggattattagatccggagacgccggtgaagaaagctgagagattagagctctcagaggagattctccgatctgtgagagcagagagtgataaagagtgtgacagagagaaagagagagagatttggtggagaggcctatttgcgtcgaatttttggaggttttttaaattcttaaaaggcccaaacttttttgattaattaatcaaaagataagctctattattaggacattacatacatttgttcctgtcttttttttattacacaactcatttattacattcttttggagccaacaagatttgaaaattaaaactggtttttcttgtttctaaatctcgtaatcagtcaaacttaactactttcatttgtgacaacaaaggaaatagaatcattaagaaatatgtgttgaataagaagaataagattactgtaaaggaaacatatgggctaagtttgggactgagcccatagatggtccatgactccatgttctgatgtacatgcagcaactccatgattgggcttagaattatatttttttgaaaaattgttacttggcttttttactgtaaattttgagggacaaaaataccttttaatatgagcaattttaattttacattagtataatacgaattgattaacaattttttttctatgcttcctgctttatagaattagtaaatcatttttcttacaaaaaggtttaattcactattttacagctttatagaattagtaaatcaactttttacaaaaggggttactagtcttgtttaatggtgtattacgttatactttggttttagtggtataaaatgggttcaagagacttgtaacttcaatctgaattgatcaaaactcaatttactataatcacaacaaaaaggaactctagagaacaagaattcaacaaagaaagaaagaaagaaagaaagaaaaactataaaattgagttgtttgttgggggacatattacaaaatccaaactaaaaaaaccaacatattttctgtcttttctttttttttcccgaataaaaatctaaaaaaaatacattaaacaacagaatcaactacacaaaaagaagaaagtcaatctgttttttccccggtttgcttggactaagttttacaatcaataaagagggtcccaatttggagagatcattcaattgggttgtcctaattaaggaaattaattagtcctttttcatcttgagatttcacaagtgggacttagccctatttgctccatctcccagcttttctttgaggctaccttctcatgccttggtacataatcctatttttttcaaatccacagaagttaaaaaaaaaaactatacagaaaatagtcaaacaagtaaagaaaaaagtgaaaaagcaacctcaagtttcttgacaagttctttagcagaaggagcagatacaatgatatgacgagcagttggtgaaatgaaaccttcttccactgctttgtctatgaatgataacaatgaattgtagtatccttccacattcaacagtcccaccttcacattcataacattaagaattattattggtaaaaaaaaaactaataacatggcatttaagaaactagtaatgacttaaattttcatttgacgaatttatcaatcatttacgattttcgtcacgatcgattaatcgttcgttatagattatttctaatgtgaacgtctaatttactaaaagaaaattagagttttagagtttactttggttaggacgtatgtgaaaaaaagatgtccataaaatagaactaaaataacgtgttacctaaaaaataatgtattctctttaggagattttctttcactatttgatggcaatagttatttttccttgttaattacctagtttagtctaagattacttcaagttattaggaatgtataatgtaatatatataaatagaaatggaagcaaaatgattactggtttatcatggatgcctagctgtgcccaagtgataacttcaagaagctcttcaagtgtcccatacccacctacataataacattcaacattataaattcccattttactaatcacattttgtataaaatctaatgattaaaatggtggataagaaaatgaaaaggaaccaaccaggtaaagcgataaaagcatcagagtgcttagccatttcagctttcctttggtgcatgtctgctactgccttcacttctcccactgtctctcctgttatctttatccacaatttacacaatattgtttgttatttttttattaccactcactctcaccacttgtgtcttctatatattccaaaacaaaaagacaaatctcttacacactcacaccacttgttttatggttttcttcctccaaagatgtgtgaatctaacaaaatggctcttaatgctactgttttggattcaacatgtaatatacaaatccatttttatcttatgcaatcatattttagcccattatgttgtgagaaaggatagaggtaatgatgatttagtctctcgaggtgttttccttacatttatcaccttgacccctttcgtagaaaggtaatcatattttggagcaacatgattggtggctttttatttttatttttcattagaaattaactacacatttcaaaagacagacaaaataattaaattatactcctaacaaaaaaataagataagggaaacatgaaaatatcaccggccaataaattggcctgttttgtctcaattgaaacacactctaatatgagacaaatgtgatatacgcgttttaaagataacatttatgaggttgatgttcttgttaaattatctaccaccaatttctttaaactctagaatttgtttttatgaaagtggtaagaaaaaaacaatagttcataaatattattctggagttatatttcggacgtacctctcttggcattagtgtcttggggataaccctgaagacagtaacaagacaaaaaaagttggttaaaaagtaatcgtcacaaatactacacgtatggcaaaattatccattttttgttaattactggagaacattgaaattttaagaaaaaaaaaaaaaagagaggtttaaacgaacccaatgacatggcgacctccattgaaaacagcttgagaaatcaaacccattaaaccaatgctccctccaccatagacaagatcgatatttctcgatacctacaaaaacaacatttggttttagtaatttttggtgttaattatagtggtcattgtcatagttaattgataaaaaggattacaattgtgtcgacaaaatagaaaaaaaaaaagcattacatcaaatagtagtggataaagatattgtagaaaaactataaagatggaaactccataattacattttctggtaaaagtacccacgaaagtacatgaaaaaaaaaagatggtaaaacaaaaataaagtatgaactttcccatcacaaattcaactaaaaaatacttttgaatttcatcctttttaagcgttagaactatgtttctaccactgaccacagtaagtacaaattgaagatgatatttcaaacaataatcatctaaagaagataatgggaaatgttttgatatgaattgctgactccactaactctaaatggcttaaaatactttagttatgacaagtcaaatgattaaacccatttcctagcaacttgtaaataatactacctttaattgggtcaacggaaaaaaataattattagagatccaacattttgatattcaggtatttacaagaagtcaataagtcaaaaagaaaatgataagaaaatatttttgtttcataacaaagaaatatttgtgcttcacactactcataaattattcaatacagaaatcaaaattggttaagttaactcttttatgttatttatgtggtttttgtatttttacggttttaaaatttactaccaagatgtgaaatcttaagtctttaaacaacaaaaacaaaagaatctaaggtctacgacatgagtcttcccaaaaacttggaactgctaattctcgattgttttcaatctggaaatggaaaaacagagcttttttctcttcttctatgttactcttaagctttgaaaaaaaatgaaaagactaattttctatagaaaacgagactttaagaaaaaaaaaaatatgaaagaaaacaagattctaaaagaaaaaggaagtgaaaatggaaattcaccagttcggttccgagttcgatagcagcatctttgtaactgactttattaccagcactacttccacaaaacacacatattctcttgaactttgattctatctccatctttctcttcacacaaagttttgttttaagataaaaaaagattgaaagatgaatctatctttctcgttgtgatgttggtatgaatgttctttgctcatatatatagaatattgggcggtggggtatatacctagctcatacgcttcctaatagtaatatcataaaaagaaacttttaaaataaataaatagtggctacatgagtttgacattcttttttttataacacgagtttgacattcttccataataaatagattagaaatggttaagaaaaaataaaacttagaatagaaattgtcttattccttaggttagttggagaccaataatatacaattacaatgtaccgaatgtcttgataaaaaggttcacattcattatatatcacattctatttaatattactccaaagtacttttgttgacacggtgtgtggatgcgtttttgttgtagaagttgccgactgatttccactaattaaaaatttaaattgtgatagcagagaacttagtacaaaacaatcaaaacgagcagaaaaatccggttttgatagcctacccgacttatcacctagccagtttaaagagaagagttggaaatgtctcgagtttgaggaccgaaaacgaagaagagactaaaataacctatgttggtttgactttaagatttaagatttaaggtaatccaaagaaattatggatatatcaagatcaataaatttttgcttaaaacaatttgagcaaataaaataagtatagataatagataacaatcaaactagaactaacaagacaaataagttaacaaactttgaatgtagatttcattgttttagtaatatgtaagaaaatagactatgcacttgatataaacacgattttttgggttcaataaattttacatttaatgaaaaatatatatttaaatatttttgaatatttgaaaatgccaaaacaaaatttttaggagagtgttgtttaaattataataactaaccaaaaatatttaatataattatatgagaaagaaaaataagaaaatgattattgtgtgtcaccgttttagaatatatataagccttcgcccaaaatatcttcaaaagaaaaaaaagaatgtgttagtgaatctaacaacaacaaatgaaatgtggtggttctgtcccaactacgacaaccgcatatctctattcatttgcttgaatatttattgtttgggttgatccaaaccaatcatgtttagccagacttcattgaaaaatgattgagttgatcgactgccctatattccgtacggaaacacaaaaataacatgagcctctatcacaattaacgcatatgttaccaattcatgtatactagaaataacctatggccttgcgcaaaataaaataatttttatctaagaaattaacttactagaacacactctacctctcttcttaaattgtattttgattgtattacttatcctttataattccattgcctgtctaggcttcaattccacatttggttcattttgagttgttattgtataatagcctaatgggtacgtaatttttagttgtaattagtttttgaaaataagaaaatcgtaccataaaaaaaaaaactcgatgacaaaccatatgggttctttttgggttaaaccagctttaaaacttttgttgaaatatgcaagtgttggagacttggagtaatattttgattgttttatttattctccaccaaccgtactaaacacactaacctaatttgtttcgtactaatcctatagattgtaatgttttatctactgcaatcatttagtactgttatattccccagaagttctcttaattttctcttttcggccacttaatgtcttaacgttgcaaaagtgacttataaatcccaagagatcagactatttggttaacgttacaaatttaatcttcattttaagagagtcgataggtgatgtatcatgtatggtccaaattaagggacaatccgaaaagccaaaaaaaagttaaacatgtgaaaaacatgatggtttaaattcatactttaaattgatgcgaacaactctctcttttatatataccgactattttaaattatttgtttttttgtcagaattattttgtataatatcccagttaataaaaaatcatccaattttaggttgaagtatatatgaaaatttcccacttcctcaatagtaccgactatccatcatatatatatttagcatattgttttggatcaatttaatttttcttagtatagcatcaattgtttatttatttatttcttaaaggtgttccctgctccctttaataaaaattcaaaacttttataaagtataaaaattataaggcgcgaggaattgggaaatcaaatatatgaaagttttgacaaaaatactgagattcacattcaccatgatttatgattcaccttaatattatttacacatagggcaacttaatacttgaaaattcgaacgtcggtgtacataacaataccattaagaggttaataaagtaacactgaaataaattacagagcacacacttattgtagtgattagtgatggtttgccttttctattttaggacaatttcaatatagatggacattccttaattgccaaagaaccaaagatataacgacacctatctcatacactaaccatttgtggcctccccattttaggaaagactggtctaccaccttgtgtccatcaaattcatttttagtagatacaacaaaggtccaagttcatataaataatagaatctgtctcgaatttatgtttatatgcatgtaaatatataattagtaaaactatagcgttgaatataacttgtctaaaactagtaaaatgctttaattaccgtcacatggttaggatatataacgagtcaatatatgaatatcatgattcatgaacaaatgttgaaatgtagtatatgtttatatgctacaaagcgaaatcaaagtgtcatcaagtcgctatattgaacataacttaaaagcaaacgttttaacgaaggattatgacgattgaataatagcatttagaaatgaaagttttatagttgatagttttacgaaaaattagagtctccttcattttatggcaatttagctactttgtcaatgtaattatgaatttatggttgaatttacgtacgtccttatttatcacaacattggcatggagataactagcgatcgatgataatttgtgtgccttgtccaatgtagcaatgtagtacatgaatttattttctttgtttaatggataaattctttttgtagtgattaccggctccacgacttgactgaacgatcgatttataaacaacaaactatttttttcgattatttattggactaaaaacctcttgactattaaaagaaacttatcctacttctgtagatacgttttcattatcataatgctcaccaaaatagggagaggaatacacgaaaaagaaaacgttgtgtgaccatattacttaaccgagacattgaccatctttttttcccctcttttatcgtacttttaatgctattattctacttgtattttagatttatcaatgaaaatgttgtttatgactatcgaaaaaaacttaattcatctacaacttaatcaatcaaactaaaactactccgttttagcccaagcaaaatggtgcagtggtaattggaccatgacctaggagaaagggataacatgactatagtgtgtctgagttcgatttccactacaaactaagccattttgtttggacaacttgaagctt

SEQ ID NO: 299 - DNA, 86579 bp, Arabidopsis thaliana
aagcttatctaaaaccctaaaagatcaaaaatttacctgttctcctaaaaatttcttcaattcatcagattgccatttattaggtaaatgcaccaaacatttacttagtgacaaatcaacaacactaacactaccaccacctccttcatcaccatcaattgattccatcatctgctcagtaaacaaaacctcgtcttcttctttctcttcatgctcagacatcttcatagccttggctttctttccacgctcagaagtcggatcccaagtattatccggtttcatccggagctccgcttcaccgtgagcgtatttacattcgtttccatgactacacgaagcctcacgcctaaagtaagaacagagactcgtcttccaccacggtgaaggagtagtaatcttcgtgtctgacgattcgagattggttttctcgtcttcatcggcgcgtttccgtttctcaccaacagcttcaatgttatccgttgcattcgaatcggacgatggaagctcgtcgattgatgatgtctccattggaattggctcgacggaagcaggaggtgtttgggttttggtggctaatggaagctcgttgatttcgattgatgatgtttccattggaagtggctcaatgggagtgagattaatataggtcagacgctgggaggttaggtttccggcggcggcggaaggaagctcgtcgattagtgatgacggtatcggaagtggcggcagatggtcgagaagtgttattggaagtgaaggagtttcaaaattgaataagattcatcagaccttaaaccctacccggttagatgattttacttcggtccaattgtctgattagtttattagtttcggtttagtttttaactttgtaaccaattttaatttccggtttgttaataaagtggttaagagttttcaattttactctattttgccggaagtcgtcgtaccacatgcaagtctaattaccaaagagcttaaacaacagtgtacaccaaaaaaaattagggtacggtttccggctatgaagattcctaaaattgcatggaatacgagtttctatgttttttgttttcattatttttagagttaaggaagattcctaaaattggaatagattaagaagtctgatctgatctcgttgactttaaatttggacagcctgtaagcttaagattgtctaacgattgtctgtactaattgtatagaacattgttgttttaaatactaattgtatagtatattactattagtagtaatatatcctccattagagacattaactagtgtttttttttttaataatgagagcagtaagttttacattaattagtgctttaaatttggacagcctgtaagcttggagattgtcggtattacttgtatatacattagatgtaatattaccgatgtagagagcagcactaagtttacattcatattcaaaaagtcaaaatctatcatctactcgttacgcagataatctttctctcgacatctctatggattcgaagacagagtcgaagctcctatcgctcacatctcaaataatgtctcccgcaaaacaaataagatttgatcttgattgggttggtgaaaagaggatgaattctttcattactaaagtaatgtctctcgtcagctcaatggatttggatttgcagccgaagccggagtcggagttcatgtcactcactactcaaatattctctctactccactctatggattcggattccatgccgaagccgctctcaaatctcatctcactcctttctcaaggaaactttgaccataataccgacttcaggttattctttcgtcaaactatggcactcgagccagagccaatatttatgtcactcatctatcaaatattctccctagtaatatctatgaatactaagagggataagcttatttccttatgtcctcaagcatgcgtggttttgggtaataatgggaattttgaagtgatcgttaaaaaacaagaaggtcaagctcataagggcaaagcaatcccgtggagtagagatagcaagtgggaatgtcttccttttaactggaagacatattggtctagtggagatgatgttacacattttcgatgccgaaactgcgatggcgacaaccataaagaatatgaaaaggctccggttgagatcaaacactctcttcatcggaaacattctcttcagcttgtcttgttggatgagagtagttatacgagggtatgctattgttgcgatgaagatctcaaaaggatgttttattattgtcggacttgcgattttggtcttaatttcgtttgtgcgaagaaagaagcaatcttatatatagaccaaccgaagtggcatgagcatacacttgcgttgtttctaagaaagacttcgttaacttgcaacgcatgtggcttatcacattcaagttgtcctctctatatgtgtcccccttgtgactttgtgatccataagagttgtatcagcttaccacgtctcataaggatatcacgacatttccatcgtatagcttataccccttcttttgatgaaggagattggtcttgtagtgtttgtcgcaagaagatcgacaatgattacggaggctatgtttgtaccaaaggttgttcgtatgcggctcattcaaaatgtgccactcagagcaatgtgtgggatggtatagaacttgagggagagccagaagatattgaagaagaagtgcttcctccgtttttggagataagtgatggaatcatacaacattttagtcatcagcaacatcatatgaaacttgacgagaacacgggcagagattacgacgagaataaggagtgtgaagcatgcatcaggccaatctatttcggtaatttctactcttgtttggaatgtgattttattcttcacgaagagtgtgcaaacctttctcgcaagatacatcacccgatacatccacatcttctcaatctaattggaggatttgatggtgttataaactattataacgataaatgctcagcttgtattggactgtgcaaaggtggtttcttctatgagtgtggtaaacaaggatgtaagtttatgctacatgtgcagtgcgccacaacttctgagccattagttcatgaaagtcataggcatccactatttctaacatccaaaccaggagagaaaatacgttgttcagtttgcaaggattcagaagagacattcaattgcattgagtgcgactttgctttgtgtttctattgtgctattttacctcaaaaggtgaggtataagcatgataagcacacactcactctttcttacgggaaggagacaggtacgtcttggtgtgaagtttgtgaggctaaaataaatctgaaaggacggttttatatgtgtaatgagtattgttgtgtcaccctacacattaaatgtacgctaggggacttacacatgaggcccggttcaacgtggatcacctttggtaacaaggtagatgttctacacaacagtaaccgtatgtctcgatctatttgctcctattgtgtgaaacactgtccatataagatagtttacatgtgttctggattgatattatgttcccaaggttgtgtagtgcgtagcatattgcagaaacgtggacgttacagagagttagaatttttgagtagatatgcttaaagatgtatcttgcttttgtatcagtggtgattcttcaatgaactttttcttttcttttccaaagtgcttaccacacacatacatagtttagtaactttaattccagccaaatttatttggatagaccataaaactatactactaatttccatttcattttgctttatttccaacaattacatgcttaaaataatatcaaatcagcagaggtttaggaaccgggcactcctcatgaacaagaagcttcaacagctaagctcttgacgacgccacgacaaggttccccgaacactctagtcgatacttcaacgttgcaactcctcaatccaatacatgcctatcaccgtgtcacacaatccaagtataaataaattttaaggaaatgaaaatgttagaagaaaaaaaggggtaaaagaatgagtaaagaccttttggacgagggagagagatcgagagctattgcaatggccttgtgtgaagctaccgcaagtacctttgggtgtaccaaagcttgcaaattttatagaaaatatcacctgagtagagatagggcatttcaacgaaagaaccggcctggttctgtttctgtttgagatctttgagtcggaagtccatgtgtccaccggtggtggatgagactgtgacaccgttagacaaagattgcttcctgtttgttttgtcgcaaatgatatttgtgttggatctcctcccatctcctcaaacagaacaagtatgttcccgctcggttttagccacgagcgaggtacatgatacctacgaaagataacttaggcttgaggaagcgttctattctgctgaatgatgtaagctggtttagtacttacaatgtctgtgaaggttttccacagttcttgaggcatttgtttgcacggtaagaacctctatagtcgcatgattctgtacaaccgccatttccagcgatactagttggccagtacctacctatgctctgtccattcacccatgcaataccctttcctgtacccgtgaagtctatagctactggctcgctcccagaaggagcatcaaatgtcgtctaagaaacataagcgattgttagagttttcacaaaatattttggaaaatctaactaatgtttttgttggtgtataatcatcaccttgtaccaaataagtggttgtttagtaggcaaaggagactttgaaacccattcagaagaatctacagttgccaaacctgtgtcttctcctttgagtccaacctataaaaatcacaaccgttaagacttgaaagccagaggtaggagcagtaatatggcaagtaacgcacctgataagtccattgctgtgaagccaaatcaattgagctaccacctttagcgcttttaagtgtcacaggtccggttattcctgctcccactaagtcaaagaaagctccataattctgtggaataagtaagataaattggttgggttactcctgcctagtaaacattttgtgccattaaaaacgaatagaacgtaccgcaagccctacggtaacactaaggagatcgattgtgttcgtcccggttacaagattaatcggtatatccaaagaaatcttctgtttgccatgtccgcttcctgtaaccgcaacattgtgtatgcaatagaaatcatttggtaaagtaagaaaactttatgccaaacttaatttcaaaagcttgtgaaaactcaagagtgattatgtacctgcaagttttccatttataaaagcatagaccacttgaccaagagattcaatgtgaaggacggctttagatccctcgtcaaggaaagtctcatcgccttttatatccgtcctgttatatattgaaagacataagaaagctctgtaggtataagaacaaaacaaagcatcttttgtatgaagagaagctactaagaaaatggctcaggtctactctaccttagtgagtaccacaagtaatcgcttttatcagctgttgtgttaatctgctctagcaatccaggtttcaagaatgcatcagctttggaaattccaataggttctttaatgtaactccattgtgaacctaactccgcagacgaaccaccatcgggctttaatgattgacgagcaaatgcggtagactcagttgcagaatttatctacatatgcagattagatatccaaattagttagttgttaataagattaacagttttagagatgctattgaactttacctttgcggtattgaaagctacatttttgcaatccggcaagatgcttacggaccatgcaggcaagttatatgattttccattgaaagtcacagttgcatcagacttcgtgtcaacatttgcaagaaaagcagcacatgatccagattctgttttatatacagcagcctgtgaagacaaatgagtacctatttagaactcagagcattttcaagcagaagagtgacatcaaattattagttacctccaaatttgaacctagagaagtaattgttggatctgtggcaatcaatgcatcttcacaaagcttgatagccttgtgtagatctcgtaagtgtccccattttggttgtctaagtagtcctgcaacaaaatgaatcacatctcttcagtaatttacacacttttgtggaaaacaaagacatccagtggtagaatccataccatactcatcaattggagcatcataatcataactagtagagattaatggtcctccacttgttctatcaaagtttgttccaccgtgatactaaacaagtcaagaccaaaaataacttatctaaccagtttgctcaggaaactctagcagagtaaatcagcagagaaaacaatttgctaattctgtttattaccatgtaatagttctggaacgttccacctcgttggtaaaaccgcgcgaccgcaaatgcaagatcttcaactggtctgtaaggagaaggatctccaaaaccaaggaacctaccaatatacaagaacgtgagtcaaatgccatctttgaacaaaggaaaaaaaaaagcaagagactcaccatccactccagttctcggtccacatctttggtttattatttgagttaggtgtaaactggtcacagtagaaaccattgcatgtgttgatctaccaagaaacacaaacaaatagaaagaatgtctcaatcacaaagactaaccaccacaaatctgacacactacctatccaagaacttgaagtcttaaaaactcaccatgggatcaggagcatctgtttgttgacacatattccatggtactccagtatctaacgaaagagccatagaagcagaccacttgatataacttttagcagccgcaccataagctgagtcaatatttccatattcattctcaatctaacaaaccaaagcatgttaacttgttacaacaacactacataaacaagttttctcaactagttatcagaaagaaaaaaaaatcaacctgcgagagaatgattggacctccttgtgatgcataaagcttttcttgcttcatcaaatcaacaatctttgtggtaaatctctgcatttcttcctacaacaacataaaccaaacccatcttaaacaactcaactatacatttaaaacaataaatgacacatcacttaaacaataccttaaatggctcattatcagttcgaaacttaattcctggaacaaaatgcaaccacactgggaaaccactgttgcacacacacacaaaaaaaaaaaactcaacatttaacaaaaaccgctaaatttatcaaaaccgacgacgaatttaacccgaaaacccgattatttacccgtaattccattcagcacagacgtaaggaccaattcttaaatgaacatagagaccagctttagccgcaagcttcacaaatttcactaaatcatatcttccttcaaaattatactgcaacaaaaaaaaaaacagaatcagaaagaaagaaaaagctccaaaaattccaaaaaaaaaaattaaaaaccaaaaaaccgaaccgaccttatttttctccggttcgtgaccactccaaaacacatacgtctctataacatctaaaccaccgtctttagatttctgtataagctctggccacatctacaccaaaccaaaaaaaatttatccagcctgtcacagagacatgcggaaacaaacagtgtgtagtactaacctcaggagtactccgaggataatgaatagaaccagagattagaactttccgtttcccgtcgattactaatgcacggtggtcataagtcacattcgccgccgtcgccgccaccacaatcacaagaattagtaataaaatcatctccatcttccttactttaaccattttcgctgcaatttccataatctaatctgattgagagatcgatatgatctatttattaagaataggcttgtagaaacagtaaagcatccttttgcttcagtttctgattcacctgttgcttcaccgttttgtgttactgcattttatcacacctacacagattttgcaaatggattgctttcgctttctctttcgcttttgctatgattttgttgagaaatgtattgctttagtggttggatttggatttgattaccgctttttattttggtcaggcgtatacgcattgcaattgcatcatcgtcgtcgtcttcttggtctcggatttaagaagaatggcgggggagaagaagattaagagaaaggattagtgttaatcagtttgattaagtttttgtagagtgatgaagacgcgggtatagtagtagccgagagaagaagcaagttaataaaggagaggagaagaaggtgggtggagttatcaagtgtttctcagagttatttgttacggtggacctaatgattttattggtactttggtaggacagaatgagacacgtggtggttttaatggtagagaaagctacgtatattgatgagacggtgacaatggattggtggtggtaactacgacttacgagctttgattttgattgtaattttggagttatcggtcttgtggtttagccacattctaatttcgaactcaaaataggctaatgtgacttgagtacttgactatatcgaccacagaaccactcaactacgttgtaattttaaaagaaaaatctctacatgatttttctacagtacttcatgattttatcacatctcatatggtcgtggtcgttatagcgaataaatccgtttgcggcttgcatagtatatagtagcattctaatagtactgcagatcggaaaaaaaaatggcgcggactaattacaaccgtttctacataaatataaatttggtccgtggcgattagtactattttctaaaaatatagtggtttaatctggttacggtttagttcgcttcgctcacaagtcacaacatacattcaaaatctctataataattaaaatttgcttatgtgatggtaaactatatgaatccaatcatgataagatatatatatatatgaaaaaaaagattatatgagatacttaatcaacctttggtatgtagatatattcttatcatgttcgtacaaattcaggttttgtgtcccatacaagtataacatttggatcatggggaatgattatgtttaaggatgaaaactgtacaggacaatgaatgaaggtaacttcgaccatccttatatttcaacaaccacaattattgatcaccgatccattatttgtaaacaaattattttcaaaaacattattaaatttgatagaagtgataaaatttctagtttttctacacgtagactggatgatattgtaacgcatatctatgtgaatggataaacacctgccctcatttatatttgtctatcattcaatgttggtttacaattagatcatgtacaaaaaaaacactagcattagtggataatgcgtacgtgtgtgtgggcgttacgggtgacgatgtcaccttacttaccatcacataattgtttgttccaacgactttaaatagaatttggtacacttcgtcatagcttatacgcacgacatcacccactgtaacctgctttctcttaaaaaagtaatttatttaatcgaaagctgatttttaaacacaagccaaaaacaaacagatcttggtgttctactacagataaatatgactactttggtgcaaaggctacgtgaacgatcagacccaaaacctcaaataagtccaaagaagatgactttgttcgagaacaagatcagaccacggaatatgttaaaaatggttaatcgaaagtgaattggtttgtctttcaatttcaactatacgtttaatctgttcaatggattgatcatgttctagaacaaaattatcttcatcaaaataatttggtgtataaataggtttacggcatgatcatataagttgcctctcaaccaaagtagccatatttatatgcattaaaacacaataagaattgtgtccaatcaacaaaatcaaaattttatagacaaatcgtaataatcacttagaaaaatatcaatgttgatagtcacaatttgagacaatttaggtctcaaaacgcttactagaaaagatctacacaacaaacagaagtttgagatcctgatcagcgtatgaaatttcaaaaacctaagtcggaaactcaattgatatttggtgaatcctttattaaacaaagtagaagtgttatttatcaaacataataactaggattaacaaaatataattgttattgaaagagaataatataaaagaaggcataaatggagagtgttggggattggtgtcgttgtcccaactaataagccaacaacatgtgacgcgagtttccatgaatcgtccgtgtttggtactattatgcttagcgacctcttttctctcatcattttttcaagtcgctcacctatttttcattatcttactctttcattttcttatgtttttatttattattttctataccaccatgtcaatcgtatgcaaattatttacctaatccaggatcacataagttctgtggatttttaatccatatagcaaaaagttaattttaaaaggattagtttctttctattcttttacatttcagattttttactaaaaaaaaaattcgattcatgtctttattagtataagcctataaggaattaatactgagaaattgtataccttttgcatgtatttgttagtctctttggatcaatttacccaacatatgtagttttgggcttatacacatttatatttgaggggtaccacatcacatgtcatgttcacaaagtcgttatagtttaattttctacttgaaagcctgatttttctccacattatttcttaaattgcaaatttttgggcccaaccaaatgatatcgaagaataataattttggaaatattaagatttcaatgatataagaagatatttcgtaatagttatgtgttagtgttattgctatgtcacaacacaaattcaaacttgcacattgcatgttgtttgacaaaaaaaaaacatttcgcaatcatcggtgaatgtattctctctaactatgggtttatgttagttgtagctatttcatcatcacctagattcaaatccgcatattgtatgttcttgaaaaaacataaacatttcgcaatcatgagtaaatgcattctctcttacaaaatagtatttaatatatactttagaaaactctattctttttataaaaaaaatgagaagtttgtacatatatagattggatttaattttacacctactccacaagaaaacatttaatttctgcgtttaattattaccaaacctacaaagtacaaaccaaagttttaaacatcaaattggctatcagttttcactttcagacaactcttcctttgcagaagaagaagaagaagaaccattatctaattcacagagctcttcatcttcatcttcatcttcggaactagagtcggtatccgaacaactcagaaaaaactcattctcatggtgttgacgtgattccgatggagaatcatccaaaatcgaaagagggtttctgttattcgggtcatcgtagagagcaacatgcctgtaatatagttcaagttccttctctgcaattgctataaaatgtctcacagattcaagagattgttcgtacttcgatttttcatatgcctgcaaaagaaacaagaccatgttgagaactagcaaacgaaacatagcctcattccaatgagcatacttcataatgataaacaatttgaggacttacccttttcttcgataatgtatcgatcggagacataacttgtggctgcacataacccttccctctataaaatatgatcgtatcatcgccaattatgttaacaggcacaccaccactcagtttagcaagctcctctgcatattgttgcacttggccgggcttactattattgcaaataaccttaacagtttcatgctttttccaatgcagatgcatgttcagaataacaccaccaaatactcctcttctaccaatcggtacataattggatcttttctgacccattttcttcaagtagaaacgttcttccccggtaatctcatgaggtcgaacctcaggtccttgcacttttgcaacttcataccgtttaagtctctcaatcagcaatgcttctttgatcttagcctgatacacgaagcaacaccaaaaacacacacttcaatacattaaactcatagttttgctattgaatttagactagactctcacaagaccttttcaagcttatacttgattctttcctctgcattaacaaacttcttcttcttccctttaacagtaagtcgcctcgggtctttcctattagctgcattcctttcctctctttctttctttctcttcaacttcaaccgctttttcgtcaaccacttatacttctttggaggatcaagttccctagtttcaaactttggtttcccttctgatatcactagattcaccgtaccataaccatgactaaaattcctacatattggtcttgtcggtagaacaaatgtcaatgttgaatcataaaactcttggcttataggaagcaacctagtgggggaaatttgacaagaacataatcacatttggggacaacatactaaactaaatgttgtatagtcacaactatacgaacctggaagaaatgagaagtggatatgaagatcgaagaaaagatgaagcttttcgcaacccacgagcaaaagcaattgccatagtttggctaaatcatctcaagactcgagcttttttatataatctgctacaaaatcgaacatttagccaaaagaattcactaaggagcatttcgtcgaacaagtggtgagcaaaactacgaaataacaaaatactttgagaattgaatactcgtagacatttacatacaatcgtaatccatatcggagataaaggatgaataattgaatatcaaacctttacctgagaaacctctatggtgctggtttgagaaagtttttgctttgaaggattcgaagttggcttcctcaaatcagagtgatagaagagtggagtgagatggattaaattctcagcgatgtggtttagagaatcagcagccggcttcgccggaggtggtgacggctaggagaagctcggcgacagagagaaccaaaatagagagagatgagtttttttctaattgggcctcggcaactaacaagcccattatgtggatcagattctttattactaacataaactatgggctttatagaaaaagtagcagtgttggtaacaggcccattatttgtaatcaaactttctcacataacatgctttagtggtcacctttattaatcttatttcaaagaaacaaaagcatacatccatacatactcatagttataactacatacataacatgctttagtgatcacctttattaatgttatttcaaagaaacaaaaacatacatccatacatactcatgtttaactacatacataacatacaaaaagaaaccctttcacacattcctcaaacaaagcggtcgctaaccatttcaccaacatgcgggggagctgccgctggcgtagggagaataacagcctctctctgcgcctcaatgaaccgcctcattgtctcttcatcgactccaaacgctatggacaatgacgtcagattcaaagtcctgagtagtgagtttgatccaactaggaactgaggtctattcttgtgagctgatgtggtgaatcctacaaactcgaatggtccggtccgagatgcgatctggcaaaacgcgaagtatctagggatccagaagacatctcctacggagactcttgtgttcatagcagaagttccattaggaaatacaacttggatctctccagagccagctaaaactataccatattctgttgctgttgggttcatgtgtggagccatcattgctccctgacaattgttgaaatttcaaattaaatacggtttaagaattgtttttttcctaaaccaatccaatctagacttaaattggtttaccctataccaaaacaataatttttagtaggtctagtttatccaagaattacgtacagaactatgtaactaacaaattctactcccatagatagaaaatttgctagaagttgctaatatacttgactattgaatattgatctaattttagagtagtaatcataccgcggtgagatttacgaggtatactccgatccccgagtgtttaagaggcttgtaatcgtcataatcaagagctatactccatccatatttgttatcaaaacttggtttatctttcttatcataaatgttgtacgagtcctcacattcagaagatcctgaccctttattcttttcttctgttagatccaaaatcgatcttacaatattcctccaagaccaccctgaactgtattgttgatcttgaggggatccttgtttagtctccaagagtttcttgagttgcttatgtttctcttcccctctcaaccccaaaaattgggtccataccgtcgattgtggttgtggttgtggcccttcggtgacgtatacaatcgggccacggaattgactcatcatcatttgttgcagctcaggtagggaaacctataatataagcatagaagcgatatgagaatatatcgacagttgcaaagtcctaattaatactttctccgttttaagatatagaattgatttttgtgcttcatagaaaaaagactagcttgggataagaaaatttaatatatttataaattatgtcaaagtgtcaaaccaccctttttgtgtgtgattgaaatgaatgaaataatcatttaggctcaaatgtacccacgttgaatgctgaagttaaagtgtgaggatcaaatccagctagaacagacgaaggccctccacctatatagaaaggctacacagaagtaacaagttagccaaatgcaaaattttattaatcaatgcaactgtgattagtgctaagtacttggaaggtttcgaagccgagactctgcgttggatcaatgctgcaaatgacatgaaggcgttgacctaggcctgtgttatgtaaataaaagacagaaccagccggaatccagtagatgtctcctgctttcagtttcctctctccgaattcgtctttgcatatcactccaagggttgcttcacctgcaagtaaacacatgtatagagagtgagagtgacacatgttgaaagaaagagatacacacatgttgagagagagcgagagataccttgacgaataaagatgagaaggcttgagtcaagatactgagggacaaagagggtcttaggttccattgttagaaacccaatgtgcattggcttctcaatgatccttcctcttggtgataacacaactctcatctctccaccttctgatttgatcacttgcctcgactctctcatcatgaaccatcctcttcttcctccaccacctccttctcctcctcctccccactctcctcctccttctccttctcctccccatgctcctcctcctccacctcctcctccccatgctcctcctccttctgctcctccccactctcctcctcctgctcctccccactcttcttctccttcatacccatttgatctcgtcatcataactccattgataagtacgaccagaagtaaaaatccgatagctctcttgtttttctccatgtttcccactctctccgatgattcacaatgttttgctacttttctaagaagggtgcatgcatatatgtgttaagtaggaagaaagaggacgacacgtgcgagacatgcaaaagatcggagccttcgtgtctatacacgcagtttcttttattagagtttgatacattaacgttttctttctaccacctctcctttcattatctcttttggctttagaaatatataattaattgagattggagatcaaatcattaattattcgatgaaaagttttaacaataaagtgattaagaactgagaactatgtgattaagtactgagaactatgttacattttttctccttagattccaagtatgaagtagcgtcgtaactaaacaatggtcatataacgaccttgactcgatctatttattgcaaaccaaagataataacataatatattaacttcaaaataatttatttagtttttctttttaatttaatgttaaattatattcaaagaaaaaatatcgttgttacgacaagtgcgacagaatttaaatttgttacaacactgaaaaaataaaaaacaaaatcccggaagctcttaacttctagaagcaaaccacatttgcagtcttttgtcatatctcctatcccccaataatctgatagaggaaagagtgtttcgagtttgcttatcaatccaccggattagtctagctgccgtattaggtgtctccccatgccttcgaccattcctttcaacttatttagttttttccttttgggatagaagtttgaagtctgttgaagtgatgaaggaaggtctagtgtggatttttttggaagacctcaagctgactacgttttgatgggtaactgataacatgttgtgttaaagaaatatcaaacagatatacataatgtcacctaggagatcagcacaacacgatggctgattaggagcatattgtgtatgttatgagaatttcctcttttgacgtacctgtttttttggggttcttatacatgtctttctataacggttgctccagttatggaagctgatgtattatgaaacaccgaaaaaaagaaaaaaaaaaaccgggccagggcaaaagtatgcaggccgaatatgaatttggagcctcgtttgtaataaatattcggatcccgtttctggggtgggctgagtgtgctggaccttccttcatcacacaacaaactaatttttcaattcattctttttttgtaaatttatcttctacctccaacaaatacatattaatttaataaaatctaataatacataatataaaccttaaacatatattatataaaaacaaattatagtcatatatattatattttaaaaattttaaaaaacctaaactcttcattgcaaatacttgatttaacatattatatattaatattttataaaattaataagcgccaaaaaagagaaaaaggttacactgcgtattatcttaaacttcataaaattaatctttatttgttggaaatgaaaacattgcaaaaatagatgagttaatgggttgttttgcacaaaactcatttaataatttagatgtctatattaaacactaacatccatccaagatatttttttcaataatatgtattatgcgattcttatttcgcatggtgacaaaatcaacattaaagcaaacggatagacttacgtgttttgggcttttggccaaaacatgaaaattataaaagataaaattggcctcagagtcagtcaaacaatatcgttattctcttgaatatcactttctaacagtttttgttcgttgattaccctttaaaatgcatttagaaaatagtgtttgtttcaaactcgttgatcataatgagactgacgagtgacgaaaacaaaatctgatcaaagcagaatgatacaaaagtctacatcgcgtataaggaaattatttttctacatacaatgaactcatgtttcattccaataatcatttggcctcattgctgaccaaaaaaataaataaaaaaatcactcgttctcttttataaatcattcctttgtgattgttatagcttaataatttatatcatataatatgtccctttttggttatataccgtacaaaactactcattctctatttttattttcattgtcaataagttgattctctttatctaagaataaaacatatttattatgtcgccaaaattggatgtaaatacgtatttgtaattttgtatagagaacatgaattgtattttgatgttttctgtgcaaactatatctgtttgtaatctattcactttatccttaagaagaataaaatgtcataatatgaatataaaccatgcgatttggatgcaatgagaaaagagaaccatacaaaaaattaaaaggctgcgccattttattcaagtttagcactgtccccttcacacgcttatcactttgcacttgcattcactattttgaagactgaaaaatctaaaagaaatgaaaaacgatgaaagctttttaagaaaatgtttgacaaactacgcaaaccgtgttctcgtggcgattccatacgtgcaccataacttggctgcgaacacttatttagaatatggatttagttatattaagaaggacagtagagtttggactttgtcgtgatacgagtttaattaaagtaagaaccaaatctaataaagttgtaaaggcttttaaaaaaaaatgtgtttagtcttgttggcgcgtcgtatttaccataccatttacttggttccacatgttctctttgtaaatgtttatcagtaatccaccacgaatcaattaaacaactactaatcatcaaggcaagaaatcaagaagctaaggaaagcataacgattcaagttcaagattgaagagtaaattggatcatatcatgacataacagagttttattacgcataatcatagagcatgtaacaccaacgactaataatgtgataccttgatattttgaaaaacattagtgcaccaaaatgtaaatatataggcatgtttgagcagtattgatttcagaatgggtgatagattttgaaatattttttggtattctgcaaggataacaaaaaaatttaacattaagacccaaaaaaaaaaaaaagtgagaaaaaaaaatggaaaagaattagaccacaattttgcttccactatattcgtccctttatgcgaaccaataactgatttaactagcgtatgtgacatgatctcgtacatatgattgagttaactatgtaaagtttaaattacgatttttgtttttactttaagattaaagatagaaatgagcatatgagttgggaagttaggaaaatttcagaataaaaatttagagaaaccgatcgatgaagaggctctctaactgattcaattatgaagttagaaaggactgaaggttggtactttgtttttcctttcggctgcttatgataacaaagggactagaaaaaataaagccaatttgtgtaatcattacaataatataccctaattcattcaaacctaatttaaataacataaaattaatattgttaataaaggttatcgatattaatagagttttttcccgactagaaaaatttggatttttagtaacgtccagaataaatatttaatgacatttctggcagagctacttacctaaataatttttctcaaacgtagctacattttgtttcttaaaaaatagtgttttaatgtttttagttttgaaacaaatcattttattatatatgaggcatttctttatatgaagcatcttttttttggtcaatgttacaaacttatttttcatttttcatgtcatgccaccatatgcatattataatcataataagtatacaataatactaaaactgatttaaatttcggtggtcaaagtcactgtttactgagaatttccgttaccttatacgatgttattgtgatacttttgtcaaattcaatagaccatgttcaatcctgtatactttggtatacgtaattcatagcttaaaaaatttcgttcacagtataataaatttggacgtacgtacgtgtagataaatgtgtttaattatatacgtacgtgtataatagtttatacggtctaattttttcgaatcctagactagtagataaatgtgtttgatgagcaaactgcacactattccgtcccatgcgatcggaacccaccatcacttgggtcatattggtaatgtgtcatttaggttaaccaaagaaacaaaaaagattagctagtcatctcgattctcaacttcgtgccgacaaataacgaactaacgatgcagataatattccttagcttgtaatgaaggtcacgtgggatgcacatgatgtcggtaaaattgtgtaacatagcttttggaccactattgattttgttctttggttgaatgttaattcgaccattcatataaatagtatcgagtcaacatggtcatattgtgaaatatgtcggtaaacacatttttttggttatatgctaattaatttactagaaaattcttaagttttggatatcttttgtcttttatggcttagggatatgtattatattaaaagtttcgagaatcatatccctatgtataacatatctaatggtcttaattaaaaatctagagataaattttgggagacaattcaagttgttagatcttcaataggaacacaatgattaaggtcaatatttcctaataatatttacccttgaaaacaccatcattaaagttgttagattttctttttaacatcgaggttgttagttaattccatcagtaacattattgataatttagatgtccacacataataacatgagtgcgtatacgtagatcatacacacatttgtatacatgtggtcacatggaccaaaacgcgtaatctatagcagtcactactgtctacaaggacgtgtcatgtcttggtcgtgtccttagcgaaatggatttaattcgtcttcacattgttatggtttcaagaacttggaaattttaatttatattattgacaaaatacactagaggatgacaaaaacacgcgtcagatttaaccatgagctgtgtccactaattttgttcgaatgtgtttaaaactcgtcttgtggatcaatgttaagaatcgagttgtaccatgaacaaaaatctttgtagtttttttttttttttttttttttttgtcttattggtttacgttgagcatcagaaagattaacaatgattttttgcacccaaagtttttgtttgaacaaattttacattcatacaaaagcaaaacattaacaatgacttcctttcattattaaataaaaatacaaatatacaaaacggtctccttctcgttagcgataggagaagattcttagaatcttaatacaacctcgctcttttatctaatatgactacataatattaacacgtaacatgtttgaaaagtttgtagcagtttcgttacgtgcttatacataattggttgacttaaagaaattaagaaaaaaacaaactacgcatatatcatatcctaggtcttcaatatgcatatggaagtaacaactaaagcgctttaaagtgagctaataataccataagttatgatcatgtccaaagaggatcccaccacgacattgatgaattattgttgttgttgttgtcctcaaggaaccccaaatcattgctctcttcgtccgggctactaatgaactcatcgccgctttcaaatgaactctcaaaggacatcttctgttgtccttgctcttgtactgacaactttgtttgctccatattatatatcaattctagtagacttgatctttggagttgcatgcctactaactctacttgagtttttgcaagttgtgcttgaagctcactcacttgtctctgcaaatgataaattgcacccgcacatccgtaaaccggatctctcatcctagctccggcttcatagaccatgctattaacagcatctgttctttgcgattctggaagttcctgattataataaatatataaaaaagattaacacataaatatcatctttcacttattcatgattttctagaagaggatacaaaagtcttggacatcttttaccaaaaaaaaaaaaagtcttggacatgttgtggaatgtggatttgatttattgaatttttatatttgacattgtggatttgttttttgatgtttgaccatgaaggaaacttacatgactttttcaaattatgaatgaaaaggaattgatggaatagacctttttcttttaaaacataactttaaattttatttcttaaagggttagagatgtatatttttatgttgaacatgtacaataaggttgcatgtagctttgaggaaaggttgttattgacctttcattacaattgtagggtctagttccggtcacatgacttatgaacccattattgttcaacaactagacttttaaccactttaacttccctttcacattttgcaaaccagatttcatttttttccatataaaattttcaaaatatattattttaatacaaagaacaaaaacatcattctcttaatatctattaaattagatatccttataaatccttggtattaattactgcaaaacattactaaatattttctgttgtttaaattcttttatagtgtaagtaagcgatattttgtgttaaattgtcctcgtttataattttgatgttaaatatctactcatgtacacacgtgggtaatgacatattgtcatagacatatgaaatacacacgtgtaacggatagagaaagaagaagaagaaagttagtacctgcaagaacttaataatgttgctagctccaaagacacggtgagcgattgtgaacttcgccgggtccgtaggaggaaagtacggtgccaaaacacatttatcggcgcaccgccgccgcaaaatcttgcaagccgcacaagggcttagtacaaccggtggttgtggcggctgttgcggcgaaggaggcggcggaggtgaagaagtgggagaaggagagttaacgggagtggtggtttctgtcaccttggcgacggcggaagcagtaggtgtagcgaccccaccgttaatctccatctttagcatgattctcaaaatattttgggggcttatttgattttcttttgagtcagttagttgagtttcttttgaaacaattgatgaaccaaagtgtgttttgtagagtgaagtgatttatggtaaggaggattgtgagtgtatatatagagagagacatactaaagagaatgattacgtgacgatataaatattgagttatgatgtcattgtttttattcggaataattttatatctttacggtgactactactaaattcctcttgagcttttttgtttcaacggttgattgactttggcggctcaattaattatttccacattcgcacttaagctaaactttttttatatttgatttccaatttatccttaaagtagtcttaaaaaggagtaatccgttccccgttctcacacatctcccttatatgcaaatattaattttatagaaaatatgtgtgaagaagtacaaacgcgttactatctttgatatttaaaaagaaactaaattgctcgaaggtattaacgagttaaattgattttgatgtgaatgccaagctaatttcggcactattaaatgatctctaagagaatagaatccttattgtgatgacaagtgttgggaattgaatttatttcatcgtggagaaatgttggttatgctactagactcccgttaagtgtaagatggatagttcaactatgaaagcgaatcgagttaggttctttgtcaaaatgtcggcacggtcagaatggcttcaagattgtaacaacaaaatgttcgtcataatcatgtttacgaaaactctcaacggctaaagaagaaatgctaataaatattggttaattatgtaatttcatcaaacctctttaatagaaattttcagcatctagagatcaagttggttatgtttgatatatcattgatgacatttaatatgaagaatataacaaaatcgattaatcatgatcaagattgacatattcgcatgtttttgtagatgatgatcgagattggactcccgttaatagatataagaggacttaatcggctaaaaattgatggaaacgaaccattcaactgcactacaaccacaaaaaacttggaacatctttgagtgtcgcactattcgttgccaacaccgtcactcctctggtttctcctccaactggtcgcttaaccgaaggataacttatgtacattttggttttagtgttctgatagtgatctttcagtggtatttacattagtcttcactcagatttctttagtttctttttacctagatcttcattttgccgtcgtgttttccgatatgagaaagacttctgctcgaaatgacgtttgcttgaagttttgaacttttcccgttaaatcatcttgattgtaaattatgttttccatttgttttgttttgttttacctctaatttcgactcttttgtcaaaaatacctaaaatttacaaaatattcatagatatatactaaaatactcaaaaactgatagaaacaaaccgaaatacaatctgtagaattccttaaaaaccacatatatcaataaaaggtaaaaaaaataatcatgcagtaatataatgttaaggaaattagtggaatccaaatggttgcctaattttggtaatataaatgtcttcttatttgttttttgttttttttattcttaaattcttgagtataactgtgtaagacttttctcttttgaaataacgatttctatgaaatggtactaggatatatccaaaacaatggagtctttataaaccttttttcttctttataattaagagaaaagaagaccgaacattaacgaattttggccgaacctgacaaaagaaaatgaaagaaagaattttggcataattataaagtcttattgtctttgtttagtatgagaattatggacgtatccccacttgtttcaacgtttttctttacgacatgacatattaattgatgcatttaggacaaatacgaaatatatattcagtttagtcttagctttagaatacaatttataactaattatctgactttgtaaagcgtggctacattctctttaaagccttgtttagaaatacatgattatagatgactcgtcccttaatatctatgacaataatttagttagttgtactaattattcttctaagctctttcttctcctttttttttcttaatatataatatagtttcgatacttctatgaaaatacagccatatatatcgtttttgacaggcaaaatagtttaattttcacatataggctgctacttcccagcggtacgaattataacgtatggactgtcattaatataaaagaaaatacttcactgaaataaattgaaaattaatataaaataaaatacttcactgaaataaattaaaaattaacatgtcaactatggaataaaaatactaacttatagtggtaaatagtggttaaaaatcgttatcaaaaaaaaatgtatgatattttcacaagatttgaaaaacaatctgaatttaaactcaaaattcttcatttatagaaaaatgaataaaacttagacgtcaactacagaagaaaaatgcacgttacaactacttgtcgtccgagaagcaaaagaacgacacgtagtcagtggtcgagcaagccagtttgtttctaaaagagttattgggtgtgctatgtcatatttctgtctctcctgccacaatcaagacaacgctatctttcaactttctctcaaccatatcaatttattcaactttctaagagttatatgagttaattagctcgatcatattatagtagaaactaaattactcaattgggggacatatttaggataagtttggtggaaattggtcagctctttggacacattaagtaaggaaaaaagggcttctttgatttttgaggtactaacgaaagctctccctcttttcttttctttttctttgtcaggaaaggtcttttggtttcttttattcattcacaaaggaactttcttacaaataatttaggaattatatcccatgagccacattcttataatcatggttctaaatggtagttgttaaacagactatgcggaaatggattatataaacagcaattagagtccttttaagattttattgttgtttcaaaaaaatgtcgttttgtattttcaatgcataatttggagataaaaatcaatttaaaacctatttctttagtatacaaataagagataaaaaaaaatagtgtattaataaggggtatagtagaacttttaataattttcttaatatgtatgaaaaactatgaatggcagttttcatgaatatgaaaaatatggatcaagcagaataaataatttgaaatgaaccaaataaaaattaaatggcgattgaaaattatgctttgtcgaatgttacaatttttttttccatagaaatgtattaatcaacaaaattaacccatatatttaaaaatatttgaactataaaagaaataattgtgaaccgtacttaaactacatttgaaccatcctatttttggtgattagctgcaatccaaatacggttcacagcaaaacgacaaaaaaaaaaaaaagaagcgcatttaaccgtctcccacataaaccataatatcaagtggttgaaccgcatcgtaccatactttatgatcatatcactattcagcgagtatatttctacctagagtaatcaatacgttaattttattagtaagatcgatcgcactgattaattatgcgtcaaaatgcataatgtagcacttcttagttgctatactagtgcgaattgttaccaacttttatgtacatatatatggattagatgtcatcaaggtgtcatgtgtctataatacaaatgactcaataactaaaccgactaataataatgataaaagaaaaaataagatagtgcataatttgttttcccattcatcatttactattattaaatacgactagatggagatgggagtagggatttgtcaaactactacctttttagcttaagaaagatattagaagaataattgaacacttatcgcattatttaggcactcccaaatttctaacttgtagaaaaaggagtttccaccgcataaaattagcctcttatatatagtcatatttatataaaagtgcgaacacttacaaagaccaacaaagcgattaaggaataatgttttcgcagattatgtacagttgatatagattggatgtattggaactaaccatcagaagctagaaatatcagaattagtttccaaacaaaaatgccgtcaactcatgagatctaacccgtttttttatatatatatataatcacattgttagtttatcctctaaatctatatatgatgctctattttggaatgatgattatgccttgtatatttttttttcatttttttgtcacaaatgcgttgtagaacttaataatttacaattaaagtaaaaaaaaaaatccatcacatagaaaacatgtatagtactgataaattattcagaaacaaagtttctcctttgcagattccaaaactaaagttggcaggcaaatttatgtaccacttgtttttgaatcaatgtgaaaatagtttcttggctttttcaaaagccaaacaatgagattttatttctccattttcttagttgtaatttcattttgtaatgaataaatataaaaagacaattttgtcaaattaaagattaaggtggcagtagctaattagatgtgatatattccctagtctccatctgcacccactatattaccacccatttacattttatatgttgatatattccacaatcgtgaaaaacttattacaagatattcaagcttacgtgtgtgtgtacgtatgtatatatttgtgtatctctgtcactctgtgttgtctgtccctcacaaagtatcttctaatgcgcgtggacctttgtgatacttccaaaattccaaaggagaaaacactattacatttttaatacgtgtgttatttgtaagaaaatagtattgcatgttggaattatctgagagttatatgcgtttgcctcaatgaagtctcattgttgacaaaaaacacaaaacagaatgaagtaccactgaaaattgctgaatattctaattttactggctatatcataattctctaactcctagtaatagttattctagtttactacaaaacctttttcatatatacaaaaaaccatatacactgatatagtggtgtatttcactagttttacgtacgtaaatgataatatatatacaaaacaaaaatcatatatactgctatagtggagtttcgttagttttacgtaatgatatatatatatatatatatatatatatatatgtgtgtgtgtgtgtgtgtttttgataataaattgattaaattatatatatatatatatatatgatttgataaaaaaaaattgatcgaattataatgagacaagaaaagtctaccagttggtgttacattgcgatgttgttacaaaagcacactaagaaaaacttacggctcacaaaaaaaaaaactaaattgaaccaaagaaaggtagaggaagtccaaattccccatgcacacttagaaagtggaaggtgaaacggtgagatcggtggaaaccttcattcttttctctccatagttcatatatagattgacaaattccaagttagaagagtgatcaaagttgctttgtccttgagaaggataccagttcattattgggtataattcgaatgcattgacttgcaatctctcttagtaaatttgcacttcgcttgaataccaaactagtcttgtctttaatgacattctagtggatctcggtaagtaggtaacacaattcaaacacgttctaaagaatagtaacatccagaagagcttaactgagaaagtgcgattccatatataactcctagtttataatctttagacatctctaagaattagatgcaataattgtatcccctgcaactaaataaatattttcatatatagacactgcacattaagttaataaactttatacgtttgtagagcacggtttgggaaactattttaactctgctataatcctcaaaccaatgaaattgtgagattaagctcagaattttcttggtaattaacaaaaagattactataatgagaaatgttttcaaaccatgagactagtgaatgcttttgtaataattactacgatactactgtagtcgttagcaaagggtaaagtgtaaacacaacatatgtttatcaaactcccgacagaaaattgtgatttagaaatatataaaatggcagtatggttattggcaatttttcgcacgcatgtagggtacatatttttctaataaaaaatttggatctaatttatatttttatcagaccgaaaagcaaaacagattttaaaagttatctctctatgtctgatggtcgaatgcttgactttaaaagacctttttttatatgatcaactagtatattggttgagttatccacaacgaatcgtataaaatacatttgggtgcatatagtttttattaggtataggtatagtttcaaaaaaaagatttatcagaaaaggatcgcgaatatgtttactaaactttattgtttggagacaagatgaatgttattactctagctaattcaattcttccttttagttttcatcccccaatgttaagattttacttgttatttactttttctttttctaagagagtaaatatcaattgatgaaagttcaggttacaaattagaagacctacggaaatgaaccttgccaaaaaaataaaaaaataaacaaggaaacatactactcaatacattctcaagaaaggaaagatttggatccctcaatggagccaaaaaaccattagatttggatatttcattgtaatgagtttgggcacaacttgaaagatgcaagacttctccggttacctgcaagggctgtatgttgacctctcattccgttgagatctgccacagagtgacggaaatggtgcgtggaaatctgcgagtgataatatatacaactatttttatgcacgaactataaagtacatatttgtttgtaagaaaaaaacataaatttctaattatatatatacaaacataaacacaaatttgtacaaaccgaataattaatagattgataaagtagataacagtaatgatttaatgcaaaataaaataattataataattataatgatttaatgcgttggtcaaagattgtgtttcggcccatgcatactcatatttgcgcatagacaacaatagggtgtttgagagatacggcttcggtacgttcaaactggtcgttattatctttgatcgctcaataaatgctgcaatagagtgaatgagaaagctcatcataatggaaattctattataaatcagatttttatgcacattatattggtcaaaggttgtgttctcttaagaattgattacatgatttgtatgtgtttcccttttaaaaagggaaaacccttaagagtgccaagtatgcatcaaaagaacaaggactaaaaaacattccaagggacttagacccgattacttctttacaactccaaaactagaattgatggtgtagcctcattctttgtatataaattatataaataatgatgtagcctcagcttctatttgcagtatactcaatatttgactcattcactagaatttcaaacgatcgatatccatgtcaaggttactaagcgtgtataatgtatatttagttgtcatccttaaatcccgtataaaaattgtttttgatttgatcatattcgatagaatcatatttttaaaatgcgaaacttgaaaagcacacataccattgactgatgtaaaccctatcaattgacaaaaatgagtaaaaccttatatcagatttgactaattacacaacagaaatggagtaacacatttctctttctataaaaaaaacactcacacacacataaacaaaaaattattacggattaaaacaatatatgtggggcaagtgagaaacataggtaattaatagtttcatacctcattcaatacaattatctgcatgacatattttaaagtatttttcacaaagaaatcatatttcataaaaagagatgaacctattaattggttagtttcgatggtacgtagctaaaataagtttatatgtaagtgttcacacgaggtggtttagtggtagtgatcaaactagggaaattgtaatgagctattctaggttcgatccatcctagaaactactttacaaagatgttgatgagaggagtttttacattgctctatctggccctggaattagtcggatttcatggtccgttgactcgagaaccagctaggaagaaaagttctcgcaacctgatttggagtttatggtgtccattgaaccggatcatctgaattatcaaaaataataataagttcataagttggtaggctattaacagtacattagaacacacctagttaaatattctttaacattcttgtagattgaacgtgctagaaacgatccacacatgacacatctacatgagtatgtatgtattataaatgccaataattatgaagtcgacatgcatttaaaaatacggaaaatatatatatggtctaattgtttacttgccgaatacatatattcggtatctataatcaattgctttgaattcttgagatgaaaagataatttaagagacccacacgtaatgaagcagcactgcagcagtaatgttacatccatttcccatgtacactaacaaaccttctcttcactaacatttaatgtgtcaatagggacacacgtctttttctctttcgttttacacacacaagtcagaaaacctcttcttcctttcttctttcttcctcatttttttccacacacacacattgactatcagttgatctcctcaagtccttttgtatttcgttttatttagagtttaaacaaaatggaagatgtataaagatgatacaaatataagattaaacttgccagttttctttataaaaaaatcctaccgatcatatatagatcaatagatgtagttaaacgaaaaaaaataaataaaaaattgttgcactgtttgtgttagattttgaaaaagaatatatgagataaaagtaaaaaatttaagacaattaacatgaaacgggagcccaattagaaaatattgagcacaattgggtaccagtgagtggatgaataaatttccgtagcccaattagggcccataataatgtataaatatcgagatgatacaaccctacacaaggcagccaaattttttaaaaatggacctcaacctgatgataacgtcgagcgcagagatgaagaaaattaagagtctcgatgatgaaaaggtatgttaaatagtgtgaacgcctagaatcatcatctgtttataaattggtttatcaattcaagtatcgtctccgactctgtgtgtagctttaggctggatttgattgggaggaaactgataagatcctgagtggtgaaattaaaccaaagaccttgatcactagttatcatttcctagctatttgatatcctcagagaggacctatgattgcacagggattggtctcagtgttctcgaattctagatacatgaagagaaagattagatccaaattgcatgaggtcatagcattagctaaaaagaggcaatatacatctctaattcttactcatacgaactcttgtggacatggtcaatgtttattttttgtttagttatatactacaacattatttataatctcttttaattaaaatttaaaaaacaatctactgaatagaaatagtcaaaaccaataataaattgaaagttgaaaacatcatctaatttaaaactttttttctacataattacaaaacattttttaataaaataattaaaatatttaattttaattcatacaatcaaattaaatatttaattattttgttatatgctaccaaaaattacaaatatgattttcgctggattctgccagatttaactgttactatatatatataaattaaattaagttagattttgatttcctacgaaactcgtatccaaccattgttcatttgtttgaataaatcgatttaaaaattgaatattaaactaaaacatacggcttcatgcctcgtaccaatattgacccttttgtcggtaggcaacaacaacctatcaatccaaaatttgaaactttgcaccattaccatatttcaaactcggagattttatacaacagctttttataaaacaattttttacagcagttatgttttttttggaccctatagagaatgaatagttcaaacgagcgataaaatatatgtataacgaataaaatatagttaatttaccgcatcgtgtgacttgttaaatttaagtggcatttaagtcacgcgcaaatctctgtgttagatttgattctgtacaagagatttcataaaatgttataaaatttcttctattgtggcgtattatcaaccaattatatccaaatcaattaataattaagtatactcctaattgtatttgccaaataaataaaatataataatagtgtccaaatatctacctggaaaatatgaagcaatcatgacagaatatcttgaaactcaccactcacatttcaaaatccaattttttttggcctctgacaacaaccagtggaatgttgatggacaacatgttaacctaatcaacaatatccactttgattttttaattgtctgtattataaaataattccttaaaaccatatgccaattgatatatatttctatcaacaaagatatatccaacataagggttgataacttgatatgtcactaacttttttctactgatgatgatttgtactaattttttatacacttatgtttatcattctaatcataaaactataatcatattataacgttaagaaaaaaagcataaggaaaagtaggatccattgcatgtaacaaataattaaccaccctagacaccattaaattacaaattaaaacatcaaagaagaaacttttttctatagttttcatagaagaactcttataggtcttcgtctcaacaagaaaaattgggaaactaaaaaaagatagaaaccctagaaattataaaaaccaaacatcccccatattagtgaaagtggtgtacaaacatgtgatgacataaactttaatatatagtaatatattatatatttatttattaatgatctgctagaccaaaggagtgttgagtaaaccattattccaagatgaaaccatcccattccagctttcccttccgggatcaatctccggtacaactccggcggaatctccggtcatctgccatggaaacccccagaacaccttgctaggattctctgagttattattgttattgttcacattctcttgctttctctcgtttccttccaaagacatccccaatgtagaagccatcttgatttcattttgattattattaccatttccggacataaacccataacacaaactattgttataagtaccgttttgccctccgaagatccctacatcattcgttgagtttccataaatagaaagatcacctccaaacccaaaagaaggcgtagtagcttgagaggataaatgatgcttttggagagtagcgaaagcgaggttgagatcaatggagtgatcataaccaaaagatgatggtggcattcccgtaattaaagggttctgaagtggatcagtatggaaattaatagacttattgttgttgttcttggagaaagctgaggaagaggatcgtttgtttcgacggcaaccaccaccgacgggaacgttacgaagagtaccgcctttagtccaatatctccgacaagatttgcagaagtaacgaggttgtgagagactatagttgttgtagtaacaaaactttgtgtttggagattcacatcttggacaattttgagcttcacctcctaattctcctcttgatactttcttcttcatttcttcttccattttcttattgttattattgcttccttttgttgaacttaccaatatagtttccaaagtctcgtttgagatttcctgcacattcaaacaaactaaattaaattgtgctgacgagtgaaataatgatgtttttactttatataacggattagttgtacgtggcgccgatcttttaccgacaataattctttgtctacaagaaaatgatttttttgaaagggtttttgagataagcttagggtaattaatcaagttgatatttatcactaaattgataaatgatatagttcttgaagacatttttgttactatgagaagaagttgaaaattattcatgatttaaatttgacatgattcttgtttgtgtttttgattgaattaagagagctcagaattattaacaaaagaaaagtgttataaagaactaaaataagaagtagaagaagaaattacctgttcaggatccatccatgtaacaaaggatcgaagcaacgattacttatgtttccttttaataattagcaattatggtagaaattttgctcaaattctagggaaccagagagagagagagaaagagagagtttgaggtgagcaaatatgaatagaggagaagagcacggttcttaatatataaagcaaatatagataaagtgtgtcctttttaatatgatttttatttataattcaaattgattttctatttgttttgtagctagttgttgttttacatatattaatatgatactattcacgacagaaaaaaaacgatactattcacatttaagtcgagatttttttgcaaaagtcttcagcaatataaactagtaatacttttgttgataactctctctttgtatggtggttactttagaatttgaacattgcgatataaaacgaaaactacaaacgtaagtagtcattttttctcatttatttctcatttgttaattacaaaaattacctatttaaatattataaatatctaaaatacattaaaataataataaaaatagacaatagtgatgataaaaaaaatctaaaatggctgtcaaaaaaataaatctaaaaagaatataaatcaaatcgtgttaaatggatggaagtcccaatactaaataacaagagaacatatcatatggatcaataagagccaaaagacaattgaaaattaaatatcagtttaaaccgaaggttatagatacacgatctttttagaaaacaaacattcgtgtgcttaaaacaaatgtatattagataaaaaacaaaatatcttaaatttatagatgttaacttaaaacaaacttataatgaaagaattgtcatatatgtcaagtctttttctattgttacgatgtgagcttttttctcacgcttttttaaaataatagcttttctaagtattaattttgattcactctatcatttctatttcgacgttgttatatatgtttttagacctattaatagagtgatcgggctattttttcgaccgaattaacaaaacaatgtatgtttgaactcttgctataccatgttaaagtttataaacgttcaaattaaattaactgataatagatagattgattaatatcttttaaatattactcaaaatcttttcccattattttcatgtggaatagattatttgtgctacactttgcaaagtctatatctgctcacaaaattaatctctaaaacaacgacaaatgaatttaataaaataaacaaaagcacgataacaaatgaatggtgatgattcataaaaaatagttggtcgtacacttatacgtatattatgtacacacaagtcaagatgactgaatctggcgtgcgttcaactatatatacatgtggaccctgccataccagtagccaccatcaccatcaaccaaccccaaccccattctctcaattcaaattccaaaccatttctcctttatacgcgtatgaaatacatactctttttttctttcccttttttactttttattatatgaaatatgttatagcaaatttggtgaaatacatcatccgatcgtaaagaaaaatatagaaaaaccaagctaataaacaatagaatttcttgaaaatcaagaaaaataacctatatatttgagtattaacgaacaaatgttttcgaccgaactccaaactctttgatgctcaaaacaaacctcaaatgataaataaattctaatagcaatttgtgaaacctcctctagtgaaccaaaactaccttccgagtataaggaagaattacgagtaaaagtttattttttcaatttgtccgaatagtctaaatttctaatacatttttgtattgtagttaggaggatagttctatactgaaatccagactaataactaattttttaaaaattcacatttaaaagaaaaaaaaaagaagaagaaagaacatacaaattgtgtaactaaaaaatatttctattaaagatatgattgcaatgtttttaatttatagtataataatataaaatagaaatacgaaatgagcgagcttgctattatgtctatcaagagaaaaggaatcggatgcggcgtggctgtacaattatacggtcctcgtgggggccaattagttagagaacacacagaattgaggatgttgattgatccattcctattctcatcttattatatgtctattttcgctgttatgtttctttagtttttcttacctcatcatatatagaaataaatgtatgaaatatcaatgtgttacatgagttagtgacggtagctgcaatagtggcttcattattttttagtttttgttatctactccaccctaaactattagaacttcatatatatgctcttgttttgaaaaaaactctcatgtttacctcaaaaaagagatctctcatctaattgtttatacctttttattttcaattaaaaaattatctactctgtatattaatggtatatgatgtaatatttaataaaattaatgttacttttttttttaatatacttcctctttaatagtagtaggattaaaaattcaattatctttttccaatatcaaatttatcatttagatttaatcaaagtatgtcaagcaaaaaatattaattggcattttcaaatcaaatcaaacaattatatttttgatacaccggtagtgctaaacacaattagataactaaataagtgaagtttaggtttaataattaaagaaaactagtagatctaccattggattagtggcttgcatgtgctacacgatgtccataattgataattctatcgatccaaaatggtgacatcagataggtattagccacatcttttagtttatttttattttcatatgtaaactatatacataaaataaaaacatgaagtgtcaattatagaaaacctttaatgctgacataagacatacaaacccaataattttgcttacagaaaaaagagaggattgcgaggaaatgccaaagccaacgaaccgaaattcctatatgtcagaatattaaaatattaataacctccaataagacaacgtttgtattattttcatataagttagtaacaagagtatataatatttgcaaattctgacatcagttggatagatacaattcgacaagcatcatgttggagttcagtgacttcaacaacgatgaagccgcgcaactaactaaattgtaaccatgtgaaggcagattgtgtcagttgaaagatgaagtaggaatttgttttgaaattttaacatatcctaatcttttatggagctagtttagttttgagttttctgttttgtatgttctctttcaaaaagcttatgttgtagataaatggacacgtacgtcacagccgagatttcttgaactcatcaagttttttaggttaccctaacattaaaaacataaacttatattttaggaaaaatatttcataaatttggaaaaattggtatgtccaaatttgttgtgtattttctaaaatattattttgtgccgtttcttcttcactaaccgtatttattttatttaataaatatcctacatattaaccatggttttttcatttccactagtatcatttaatttttgatacgaagtatgtgatgtaacagagtttttgttttgtagtgacttaaaccgtctgatccataccatctgttttaatttcgtcattcaaactctatatatatattgtatatgtgtgttttagtaatattaattttgaatttttggtactcgtgttacatcaagataacgtataaaataaatcccatatgtctagaagacatcctatcaacagtttttaatttaaatgtcatgtgatatatgtttgaatcgtcttacgaacattcatatcactttttcgaatatcaatttttaaaagtaaatgtgtgaatcgtctttttctcatatatactagaatcaccatattaacgaaaaaggcataatgggaatgtctaactgtggtttgctttctattaaaattccaaattgatctgaggtacaatggcatcgatcttaaatgtatatttttacttttgtcggctatttatatcaatgtgatttcgttattaaaggtagagtttaattttagtgggagatagttatgcaatattagtatgataaagaaaggtactgatcacattgggatgcatttgtaagattatgagaagtcagggatatgggccaacctatgtatcttttgactggtcaaaaacatttgattgtaatcaaaatttgctcttttagtcaaagaaaacagtataatggtttagaataacaacttgagtgatattttggggaattttggaagaatgggccactcagtgttctctgaagtggggaagtagcttatgcgaagaaaagaatctcatagttttatgatatgatgtgtgtgtatatacgtgcaaataatgcgaaggaatctctatgcgtagataaggaaaaaaccaattccatcattatgttttttcttcttttgttttgcttgattgtttaatttgatgattgatttagacttttggttggtatgtggatgggtttttaatcagtcataacacatgatctaaacattttcttaccatttttataagttaaagtagaactaataatagtacgagtagtaggactaatagctaataagtagctagcgttttatttactctcttgatctttataaatttaattagatacacttttttgttaatacatagaaaaatgatggacaaaaagcaaaacataaaaaaatgatgaaactataataatttaagttatataagtacacttaaatataaacataaaattgtatatcatttttagctattatttccattatttgtatattgatgtgtatatctcttattttttagctattccataatgttttacagtattattttatttttccgtggaaaaactttaacattttctattaccaattggactaatatgtaactcaaaacataagtttagagcttagggatgagaggctgagtgaaatatgtaaggagcaaatgacataacgtaagaaatgacaagaggtaaaatggtggggttcatgcatgcaaaatccaaaggggtccagagataggacaatggaatggaacagccttaagattgatcagtcggtgcgttgtgggtccttaatacgacaaagatcgatcaacacttcttccatatgctacacgatcttacacatggcttcatctcattaccttctaccgacacacgaatattttccgacttacgaggaaagtaaccaaaaccaacttgcccttatacaaatcatccacatttatttccacgattttgtatactttgcatttttgtataaatggtactatttctcaatttctttttccatgccgtcaatttgagcaggaatagttgtatacatgatgaaccttaacatttgttttatttataaaccacgaaactagtatttggtattaaaagttaagtacatttgttcaccaaaaaaaaagagtgtgtcatttgtatataaagttgatcatttgtttgtattagcgcctaataccaacgatataaaaacagaaaatctagatgaatgatacgtccaccaaagttatatcatacacaatatttttcgaacttcttcatgaatcatgatcatacaagatatggacgaaaaatgagattacatataaaaattattcatctcaaatcaaatttttacccatcaggcattggtttggtgacctatgcattcatctattataattatctcgatggatcatgaatcatcaagattcaagtctccttgcgtgagagagtactatagccaaatagataaaaatgagagtaaataaatgatattaaaataaatatttgatagtactatatagttactggaatcgaaaacaacgccagcatgaaaagaaaaaggatcaacgcaagagacggtgatgcattgggccaagtgtttaaaacaacaaacaataatgccgttctccaagggaaataacggttttatccaaaagaaattgttatttgcgtcacagttttgagtccattgggttacattacatacacattaaaatgcttggacctagtctgttgcatttctaaatagtttgcacaacaaatggaacggttgtataagtgaagctgattttgcaatacactaggattaaagcccgtactatatacgggccaacttcttttgagtgatataattactaatactaaatattaatgaaccatgtaaacataatgaccaaaaaaatatatattacgacgcttaaacatataagatagttttttccttctttttctgaaatgcaaacccaaaccctaaaacgtttgttgttttgttgtttctttatacaaaattatttgcggaatttcacgttcatacagttgattcctcttgtgttatgttgcctctattttgatttctagatggatttcaaaactctcatgcaatttatcgaatccctggtgtgcgtagaaagtatgagaatgaaaaatgtacaaatctgaaaacaaataacatatcaaacattcggaacattagcatgaagagatgaaataactgcgcacaaaaagaagggggaaaaaagaacaatattttttgggttaatagtgagattgcaaaatttataatccatagtcgataaaacaaaatgttttttatagtcaaatattcaataatcagatttataagatataacatctcaatcattactaccaaaatgtatagaacatctgaacatataacatctcaattattactaccaaactgagttttcttttttaatgtaattcgaaggccagccggtcaataatcctagagttggtcttgtaatgtgaattgataggtgaatttactgtttttatcgaaaaaatcacatttttaatcctgaaagtgtcagtggatactatgttaaacctcgacattatttcacaaacattataaaccaccaaagtaattttattaataatataaaccttaaaactgaataaaaacatacatagtaatggccatttcttcttcataattatgtagtattatatatgtaaaaacttctgaggccagaaatagttactatgtaatttatgtatagttaacacacataaaaaaaatgctatgtaatctttgtctctctgaggctattactctcattttaacaaacaactgcacacaaaatgaaaaagagaccgtacctatcactacacacaatgacgatagaagatattaatcgagttgacgattctgctgccttcgtatctctccctcacgcacgttctatagagcgcataattttcatcaacaaaactgatttttttcatatttctctttctctctcttttttttttcttttgtgaaaccatgtttctctcttaaccaattagaccaattcatagttttcttcttatacttaatcgtctcgcttttcttttaatatatgttttctggactaaagtttcttacaaattttgtctttggtatctaataatcgtctctctattctgcttcccaaaaatacacttcctttcacgtactaataaaacgtgacatttagttttcttaatagatgtcacatactatataatatataccgaaagtcaaactagcgaaagagtttcttcatactttacattgatgaaaattataaatactctaaatggattttgtattaatgttgatatttcgtgatatttaaattttatatgaatgttgatccaaaaacccattttaccaaaccaccataaaactcattctgccatataacatgttaagtcatgtaacttatcttgccatataatccgtcatgcaatatagtctgtcttatgctttttttttatatatttttaaattttccataatattataaatttttgttaattttaatccaccctatattgaaacagcgagttgataattttttaatttattaatgttgatccaaaataagtctcgctaggccatcataaaatctcgtcccatgttactttttattttaaaatgtttaattgttcataatattataaactttctatgctctcaaatatatcgattataataattcgtgtaaaattaaagaatttaactaaaaaccgaattaatatgtatacaaactttttaatttggatgtttgttaagtgaaggtttccagctcgtttagatttatattcattttgatcttatttataatataactctgaatcattatctaaacattttaaccgatgtgggacattaaacacatattttttcattaattgggtaatatatgtctgttttaaaatttttaaattacaatatatgtagaaaaaaattgagatttttttaactctatgtattataaattattcaaaggagttaaaaaataatcaaacaaagatggaaaaggaatcttaaatctaaatcattaatttgaaatatcgaagcataattagtggacacagtccaattttggtaatattggtattcgacttttaggaaaaaaaactggtgggagatccatgttaaatataacctgacccaaataaatttttatgaataatttttcttaaagaatcagataccatttgtatctaaaattattttaacccttcagccaaaaaatgacttcaaaaatactatagagataataaatgaataattattgggttcatccataagattaacctttttattcacctcattttattccatctaattattaaacttatttaattataaaatccaaacttttactacttttttataaactcaaaccgatatataatctcgttgtaattacataatctaaattttaattctcttttgtaaactcaaacagatattcaacctcgtttattgtaaaatataaactctaaccattcattctaaatccgaaccgatatataatctcggttaattataaaatttaacccttttataaacctaaaccgatatttaatcacgtttaattgtaaaatctaaatccttttataaattaaatctaaactttttaatgtcggtttgaatttataaacgggattataactaaaaaaaattctgttatgtttttagtcataaaatgttaatttgtttatgattatttttgcaaccatttgttttgtgtttataattgttttcaaccgaatgaaaatgaatttccaccagacttataccggacgaaaagagtcttttaatttcaattttttaattggagatgcaaaatcctcgttttctcatgtcagttgtcgacgggaacaaaaactgaactccgcttctaagatccttcgacggagagaaagatatttcagatctgatcggagagaatcattctcaaaatttctccattctaatttctctttctcgagagagtgaagagagacaacaaggaaggaagaggaaaaatggaggaattcttagataagttgccgcagatggatctgatgcgttcggagaagatgacgcttgttcagcttatcatccctgttgaatccgctcatcgttccatcacttatctcggcgagctcggactcttgcagtttcgcgacgtgagtgtgttttaaactcagatccgtcttcttctctttacgaatctaacgaatctcttcgtaactatcggtttaggttgattagaatttagtgagaagtgagatgtttgatctcacaatgttgatccgtctctattgatgtgttacttcgaccacgagtggacattgtagtgatgatctttttgaaattggttgaactggaacgaaattggttggatttagcattagcggatttcaattggtgttgcaaattcggttttagattagcttatgattgagatattgtaagtttgaagaatctgacacactctatctttgtttccttaacagttaaatgctgataagagtccctttcaacggacatttgcaaatcaggtatcaacgcaatgttctctgtaattctactacacttgagctctgttgtatgtgattcaatgcagatagtttttactctattgatgtggtggggcaatttgttttggtatagatgtgtgtgtatatatattaggctcagtacaaactttgtagtaatatggtgattgtttgagtgtcactaatttgtgtgatggtggttctttaactttgtttcaatttttttttacaagatctcttcttaagaattcatttatttttgaagtataatcgtagatttcttttctagtttatattacattaactcccatgcaggcagaacttgtttaccaggccatgcttaaccacaatgagaaactggacgtattgctcagctgtgaaatgtttcttttacactttggtttgaaggttctaggattttgatgtagcttagagacttggagtggatatatatgggctgggctatgcatgtacttaattgctgcactgatttatgttttccaaaatataactttgacatcatgatagaaatccttattaaccacatttattttcgatatcaagtagtatgtggtgaaatttttctcatgcatagagcttttttgcttatgcaaattcttgggggcttttaacaggtaaaacgatgtggtgagatgtcaagaaagctgcggttttttaaagatcaaattgacaaagctggtctaagatgttcaccacgccttgaaatagaaccagatattgcacttggagatttagaggtcagaattcaatttttaattctgttttggctgagaagtctttattttaatccctcttttattttgggatcaggcttgcttttttatgaaatttatactttttcttttgcatcgtcaattactttctctggcagagacaacttgctgatcacgagcatgaagtacttgaaatgaattcaaacagtgaaaagcttcggcagacatataacgaacttctagaattcaagatagttcttgaaaaggtaggtgtattcgcctttcgtctcagatctatatctagtaattgacaaggttgtatagcgcagtagctgttgctcacttttcatccaacttttactcgctaagatgtaagctcatatattgctctttttacctttttttccaggcaagtggtttccttgtctcaagtaatactcatgcaattggagaagaaattgaactacatgaaagcacctactcgaataacggttttattgagactgcctctttacttgagcaggtgattgcatgtcaaagtttccgttttactgttgctacctggagtctcatttttatctttactaataaaacagttattttattcacaggaaatgaatcctggacactctaatcaatcaggattgagatttattagtggaatcatcaacaaagacaaacttcttaagtttgaaagaatgttgtttcgtgcaacacgaggcaatatgcttttcaaccaaacaacctctgatgaggaaatcatggatccttcaacatcagaaatggtcaggataatctctgatctcagtgataatcatatgttatttcagttggatgcttatttactaactggttttgtgctcgtaggtggagaaagttgtatttgtggtattcttctctggggagcaagcaagaacaaaaatattgaaaatatgtgaagcatttggtgcaaattgctatcctgtccccgaggatacaactaagcagaggcagcttactagagaagtaagttaaacattccagaacttgttcttatttagagagagctattgaagatatttctatacactgtttttgtaaaacgattcctgcaagttgatttcatcttgttcatatgattttgttactgtccaatcatatgtgactgctgatttctttttcacactgtatgcatcacactattgctgttcctaaatatcaatgtatctggagtgtaggttttatcccgactctctgatctggaagccacattagatgctggaactcgccatcggaataatgcccttaattctgttggctatagcttaactaactggatcaccacggtaagaaataacatctgcaattagtttttttcccctttaattagatgaagtatatatgggattttatggtccacacattatgttacatccgtgattttagctggccttttactggtaggttcggagagaaaaagctgtttatgatactctgaatatgctaaattttgatgtaaccaagaaatgccttgttggcgaaggttggtgccccacatttgctaagacccaggtatactacaacgttgttatcacttttacacaatcgactatcatttccttgtaagtgcaattcatcaacaacttatgtgcagattcatgaggtcctgcagcgagcaactttcgacagcagttcacaggtgggcgttatatttcatgtaatgcaagcagtagaatcacctcccacctatttcagaacgaacaaacttacaaatgccttccaggagattattgatgcttacgggttagttccacttttgatcattaccttgtactattgtaatgttccatggtaatgagaaaacatcatcatttagatgcaagtttttggtcccgtgtttccctcatcatacattcatgattttagaataactggctgctttctaacaacgcttaacattcttcattccgtaccttcttaatcaaatgatttgttgattgcatatgccagtttatttccgctgatcaccacattgtatgtatgacatgatacttacttggcagtgttgcgagatatcaagaggcaaaccctgctgtttattcagttgtcacatatccctttttgtttgctgttatgtttggtgattggggtcatggtctatgcttgctgctaggagcgttgtatcttcttgctcgtgaaagaaagttgagtacgcaggtatggttgtcaccctaatgtttttgtattagttgaacgagaaaccagtgacagtactggctttgagcataaaacatccataacaccataacatagagttttgttttgtggctgataaattttttgtacctttggttttgaagtgagctgcagcaatagttatgttgcattctcgtgctctcagctagtgttgcaatttcttgtgctcttagaggattttcagatgagagatggtgaatttcaattatttagagtcagtataaaatatatggcaattgcacttagttttaccttttcactgtaggatataggttaacatgagggttaaaaaataactgttatggtgtgaatatcattggccctttgtaaaatttcgacctatgtggtatgatttttctgtgtcttatctttctttaccagaaacttggaagctttatggagatgctttttggaggccgctatgtaatcttactaatggcacttttttcaatatattgtgggcttatctacaatgagttcttctctgttcctttccacatctttggtggttcagcttacaaatgcagagatacaacttgtaggtatgtattatgtttgaatctctgatgtctttagtaaggagtcatatctttatttattgtgattattattatgctatttgttgctgatatgcatattactttttatccagcgatgcttacacggttggtttaatcaagtaccgtgatccatacccttttggcgtagatcctagttggcgtggcagtcgtacagaactgccttacctaaactctcttaagatgaagatgtctattctgctgggaattgctcagatgaatctgggactaatattaagtttctttaatgcccgctttttcggctcatcattggacataaggtttgtcttatttgttatttatcttccaaactttctgaattcttttatgtttttaaaactaccgggatcgcttatgtctttgtgatgtgtcatcaggtatcagtttatacctcagatgatatttctgaacagcttatttggttacctttcactgctcatcatcatcaagtggtgcactggatctcaagcagacttgtatcatgtaatgatctacatgtttctgagtcccaccgaagaacttggagaaaacgagttgttctggggccagcgtccacttcaggcacgttttccttctctttttttttccaaagctacattgttttttttttccacatcttactcctcttaacactctaacaagatactataacctgcagattgtgttattgcttctggcattcatcgctgtcccatggatgctttttccgaaaccttttgccctcaggaaaattcacatggaggtaagactttcacaacaactgttttatttacagttcattttgggcactgggcttatcaacaggatgaaatgtattttttcagaggtttcaaggtcgcacgtacggggttcttgtttcttctgaggtggatcttgatgtagaaccagactccgcaagaggaggaggccatcacgaagaagagtttaacttcagcgagatttttgtacatcaattgattcactccatagaatttgttctaggttcagtttctaacacagcatcttaccttcgtctttgggctcttaggtaagttagcaacgtctccggattttacaaaatgacccattaatccttctcacttgttggtcttatgaattttaatttggtatttacagtttggctcattcggaattgtcaacagtcttctatgagaaagttcttcttcttgcctgggggtgagtataaagttcaagttacatgtttaaaacttaatatctcactgttattgatacatttgttctctttgcaaacaggtatgaaaacattttgatccggttaatcggagtagcggtgtttgcgtttgcaacggcgtttatacttctgatgatggaaacactaagtgcatttctccatgctctgcgtcttcactgggtagaattcatggggaagttcttcaatggagatggttacaagttcaagcctttctctttcgctttaatctgagatgacgatgaataaacaccgtaaaatcctcagccatttgcacatcccaactctcccaaaatcttccccaaaaatatatatagaagaaaattggcttttcccaaaactcattatacggtaactcctctgctttgtctttttttttttgaatctttataaccgaatctttcaaattgatatttgttatgccgtagtagtaaatgtcagaagtggacaatttagatctctttttggagggtttcagttttttttttttatataaaaatatacatccttgtcatggatttttggaggtttgagatataaatggaaccttatgttggctatacccattttataaacaatacataatcttttaacattagagttgtaatggtggtgatgaaatgtatttgtctcggattccagatcgtaagattttgatggtgaggttgtgttatgtatcagacacttcgtcctaaaaattgaacaagttcttggctggtcgagcagacattttattgttcaatcaatcctgcatctaaccgaaccatatgaacttttgtttgagttcaacaaaaccgaatcaaatccaaattgaaatcagagattaaccaaatgtcagatggtaattctgatctttatttattagtagtaaaaaaaacaaagaggctcgttaattgtggttctttaaatagagcggcgactttgactcgttcatatatttgaccaattgttatcttcaaaatatcttagctagcatcttatatccaagtagagcaaatttcatgcattgacttcaaaaagaaaaggagggagagtgacctttcttgggtgtatatttgtatgcatagaggaatatattactctaaacgtaacaatctcatcaagtttgggtttgaagaatctgttttcggctcacaagttggtgaaatgcattcaaagaccaaattggagacaaagatcattcaagagattatcttttccagacagtcatgggtattctgaatagcctcgctatatggaagtgtagcatgttggagataaagatagagaagacaccatcatgcacaagtccaacaagttcatgcttctctaacctctcatatgtgttaatgtgagattgctcgggtctaatggatttgacgtggttgttgtttactccaaaccttattgatcttaaggttggttcgataaatgaacaagtatttgatgatataataagaacaagcatagtgtcgaaaacttagaaagcttccattcgactctaaaagtggtgttgttggtaaagaacttgtcataaatcacgtagacgaggaattgatagaaagagttaaatgggaagacgaggccacaagacttcgtttctcatcttcttcctacaaattccaaaaagaaatgtccaaaactatctagctccgcgggaacgtgtgtaactacaaaaatgcataagttaattaaaaagtcagctccttactaagtccgtcttgtccaagtacttcgctccgatatgtttctaagtcattattctttgtagattcataataaacccatctctttcttggtattccaaacattccttgactcatattttgatattattgtattcatccaaactttttgtgtaaaccaaatcactataaacaaaagtcataagaaagttaagaatttcatttctttgaataaccgctcaaatatcaattatcttatcattcaaaattgacattaaattcatcattaagcagaataaagctataataatccaccactagctagaacttattggttcaaccgtaaagaagtgataataacctaaataccattaaataactcatcaatgcttgaatgatttgagaccgaacccaccttcccagtactggagcgttactttccactttctagactaaagaaatctgagtagacactcaaatcattcagatatttccgcaggtaaaccaattttagaaatcccaagttgataactaaaccttaagtagctcaagtcgaattaaaccccaaatcctaaatctgagtgatattttttcccgaaaataattggtttttacgatatgaatttatcaccgtaacaactaccttactaacaccatgtcacaacaggtccgagacatcgagacacaactctccacataaaaactggactaaactaaagtgttcgacttcaaactcaaaataaaccggactaagtgtttgaaattaaattaataaaccaaaaaccgttaataaaccggactaaagtgttttaactttttaaccatcactaattaccaattatccaaaataaataaaccagaataatccgaaataataagaaaaataggttttagaatacctagaaagtaactggtcgcatgagataaatgtacttttaacatgaaaaaataacttgccgtcaaaacaaaaaaaaagaacatgaaaatgaaaaataaattaggtataataattattatttaactatattaattgacaaaaaaaattgaatttgacatctttgaaaaaacaccagccattggcagaacaaaaggtttagccacagtttttttttttctcctcgtctcttcgcaaatcctcttcttccttcgattctctctgaaaatctcttctccttcctcaaaaaccgatactctcttcttcaatctccctctcttatctctccaagctaattctccaaaccgtcttttctcaaaccctaacgtacggattagggtttttgttcgttgattccaaaggttacgactttcaatttctccaccaaattctctgtaaaggttaaagatttctactttcttttgagttcttagcctgattctttaaccttttcgttgtcattcgtcggaattttggagtggtcaaagtaataatctttatcacaattcaagctttttgagagttgattggttaaaattgtttctttttgtttttgcgagtttaatttagtttgagatttgtcttcactggtttctggttttgattagaagttgtttctccattgtttaaaaagtaaggagtaatgtgtagttgcagtagttttttttttttttataattgagaattgtggattatgttctgattctaatgattgtttaataatttgtttaattaaaatatatgattaggtgacgatgaatgagaaaggagaaaagacttgtcctctatgtactgaggagatggacttgactgatcaacatcttaaaccttgcaaatgtggttatcaggtttgatacattacaaccacttttcctcacaatgtggctctcttgtttgtttattgtcactgtttgagtagaatgtgtgttttggggtcttgtttatagtctgaaaccgttgggtgttgatacgtttcattaagggtattgcaatttgctatgggcagagttttttctcaccctattcttttgagtttaagcaccaaagaatctaagcttctgttaattctgtatgctgtatatattaacacatgcctctgtggagagttgtcttctgcttgaaaaggaccacgatgtgtagtctcagatttcgaattgttttataggttgtcccacattgtctataagcatcttgtgaatggaccttttcttataatcgatgtttaaagctgacattacccagccttatattgttgcctgttcatttatgtttgaattattcagtgtgccactgtggtgatctataagaaaccctttttatgtaaatacatgtactttgtgcagatatgtgtttggtgttggcatcatattatagagatggctgagaaagataagacagagggtcgttgtcctgcatgtcgtacccgttatgataaggaaaagattgtagggatgacagtcagctgtgaaaggtagatctgaagctgaaaacaaacccttttttgtttctgtgaaacgtgtaaaaacttatctttttcttgttctgataattcactaggttggttgctgaattttacattgaccggaaaaagtcacagaaggcgaagcctaaacctgcggagggaaggaaagatctaactggtgtgagagttattcagagaaacttggtttacgttatgagcttgccttttgacctggcagatgaagatgtaacttaaacagccttaacttatctccttggcactcacatttgctttgaaaagagataacctttttcatatcattaatctgggttgttatgtatgcagatgtttcagcgaagagaatactttggtcaatatgggaaagtcgtcaaagtagcaatgtctcggactgcagctggggctgtccaacaatttccaaacaatacttgcagtgtgtatgtatccgtatttctttacacattcgaatgattgtatctagttcttgatgaactaatatttgtgagtccatatagctaagcacaaccccatttctttctgcggtctatttgacatgtttgcttttaacaaacttcattgagctaacattttcgtttttgtctaaaattgaatttcccagatatattacttactccaaagaggaggaagcgattcgatgtatccgatcagtacatggatttatattggatggtagaaatttgaagtatgttatgttttctttttttttcaaaaatagttatggtagcctgtggttcaatttctaatatatttttggatgtcgttagggcatgttttggaaccatgaaatattgtcatgcgtggttgagaaacatggtaagcagatattgacttgcttttgctcactaggtccctctatatacttaaatacaaatccaattgtgtttcgtggatgcctttttgtttcagccttgctccaatgctgaatgcctttatttgcatgagattggtgcccaagaggatagtttctcaaaagatgagaccatatcagcgcacatgaggtaaattaatttcaataatctctgccttttagttaaatgaaatagattgtggttgattcttgtttttcgttgatgttgatgttgggctccgttagtgaagtatactttaattgacattaatattgcatttagctcatgttttgtggatgcagatgtgaacttgttcactagctggttttctttgaaagttttaacacccatcctttcttgaagctaggagagatttgattttatatcagtaatttcttctgctctatatgttgtgctcgttaggtggttatctgattcccgttctgtttgaataggaaaatggttcaagatattactggttggagggatcattatgtgcggcgttcagggagcatgttacctccaccagttgatgattatgttgataatgagtctagcacaagaattattccaaaagttgttttgaatgtaagttgccaactcttcttggagcttcctgaattttttctgctctcagcatattcacatgccgttatactttatgagaaggactagatgcgtttatgtgtgataaattctgcttttgacttctttcttattcgcccttttttttcctttgcagaatgtacatagtgccgcgaaaaattctcctccaaatgacagcaacagtcactctgttactcttcctgctggagccatgtggtacactgaattcttatgataatgttttttttaattgctttgtctgagaaacttaacttgtttttcaggggaatgcattcttcggtaccgaatacaccgtcttctagggaacccttaagagacaaatctgctacagtttcatctgcggttgcaatcaatcctacacagatctcttctcgtagtgatgaattaaggaagccagcattagaggctgcaggtggaaatgttttgaaaccacaaagcctattggatgggaaaactgattttcctgagctttcctcatctaataagacccagatcagtaatagtaggaacgtagtctctgccagtgtggataatagtagagctattagtgagccatcagattgcacagaccttccagaacatacttctctgtctaatggaaacaaaatgattaacagaagaatacagaatggatgcagcaatgttgtgtcagtggatgcagatagtgttgtggatggctatcatggaataacaagatctgacaaatcacatattgatcatgcttccataaagccaactcttacagaggtgtcccaagactatttacagcgttgtgtcgatgaacctagagaagttcagccattacaaaagtctggtagaactaacgcaaatgaggttggtgtctcgagagaagaagttaatagaggtacttctttgatgtcaccattgggaacaggtcattatcttgaagctgaggatgatatatctttgttctatagacaaagactcaaggatccggaagttcttagctgtcagtccaatggtttcctacgcccgtcaaattgtatgcagccttgttcatcccagtataaggctgagcatgatgaaaccaggactgtgtttggatcttcctattctgacagcaggggaagtaatatagcacccatctcaaatggatataccgagatgccacttagtgagcccaatcagttaaacggcagtcttaaccattctattttggttccagacaaagcaagggacacacagccaattgaaaattgtttcgttgactcccatgaaagcccaagtgaaatagatgacaggataattgcaaatataatgtctttagatcttgatgaatacttaacttcacctcataactatgcaaatccatttggggaaagtgacgaagaggccaggtctcttaagctagccagttccagtaaagttgaggataatcaatcccggttttcttttgccaggcaagaggaaccaaaggatcaagcttttgattcttacaacgcctctaaccagatgtcacgtggcaatgacttctaccagaattcttcagaacgacagagtcctaatatgggtatgtttgggacctataatggtctttcatcttgttatcgcaggggactagactacgtcacggaaagctccactttgccctcatcctataaacctacttgtgagtgttgatttcttgtccttacctttatcttctagccttctttgtccatgtttacttatactgcaccaaactggttctgtctggttgatggttataaatttcaaacactatctatctagtgccgggcaataataatgtttataacatctagtgcggcttaggcgtattggtatgttaggtgctgaaaatgaatagatggctttatgttcggcatatttccactgttttgagttaatgtgtttcttggttatggaaatattatacttccgggatattgactttggcgtgttttggagcatttgtgtgatgaagccatagtgcctacatattattgggattatggagcatttgtgtaatcttaatcaatcctttgtttttttgtcttgtagctgttccaagatgtccggtttcagcaccacctggcttttcagttccaactccaagtcgacctcctcctccaggcttctcctcaaatgggagagaccatcagatgattgatggcttttcaggtagtttatatatctttaaagtttcttgggatctcatgatgaatcgcatatgttgctgccacctatctctagatatattaactatttgttctcgttacttgtaggaaactctcgtttttctgattcaattgcgtacggtaatcactatcagcagtcacttccgattgaaaatgtgagggatgttcaatacatggatcctgccattttggccgttggtcaaggctttgagaatgcaagcctagatttcagatcaaactttcaaggaaacacaaacatgtatggaagcgcggcaaagctccaacaacaacaacaacaagcggtaatgcagaaccctttgtctatgcagaaccctttgtcttcgcatcaaaactgtagattcactgattctttgggaatggcaccaaggtttatagatcaatctcaaggcaataacttactgactagaaatatggccttgcctaatggtcactggaatgggttgatgagtaacgagatccaaactcgaaacagacttcaaaatgagagacttgttggttcgactaattggatccctggttacaatgggacgttcaggatgtaaacaccgtctgcggaatctgtgagcttggtttgcctttggactgactgataggaaccatcatcggtttggtctaggagccgtgcttaaatcacctcggccttaaatcttttcttctggttacttagtagtaaagttggtgtaaaaaaagctttaggaaggttttttattcgtttatgcaattctataacatttactcttggttttgaagtatgtcaaatatggattttcgaggttaacataagatctatcttcttttagcttccatatcaaaatcacaacaccaaaagtatacaacttgtatttaaaaaatcattagttgactaattaacatggtttctaccaataaagaaaagataatcactattttaataactctaaatgtgcttttgtgttctgacaaaaagatatgaatagtaaacaaagtaagatgggttacttagtactattctattacaccaaacaaaatcgtatatagtttaatgcagatatttatgaatttgcagagagacacctcttttgattctgttacatactaataataaattacataatgtttttaaggattggacccaatatgttttaacaatcgtctcacgttgtctcattttgtgccactaaaaaaatacaattgtttatattaaggattctctccgacaatgtaggtcatcattcgtatttattttgcttttatgcatttgttgccttgttcctgtttgactatcatataccctacgcaattttataagttttttctatcaatgtattaagtatttggtgtggtcagaaaatattcattactcatcgtatttaatttgataggaactataccatatctttttagttggccccaatttgcttgagcgtagataacgttaaatacaatctgggtcagattctgtcatgtccacaattcacgtctataggaaaaataaaaatatagatctataattttgttttaatcccttagaaatttgtttctttgaggtaaaattacactcaagcttaaacaattacttgtttttttttttttttttatctttttgagctgtttgactaagccttacatatttttgtaagatttggatcaaacacttctaaatctaatccgaacccataataattgaaagtagtatattgggtaatatatataatttgtctacactaaattacacatattgatatcgccaaataatttggttgatccgcttgttgtggatggtatacgtttccttcgggtatttttgccattaagatgattttttatactaacattaaacatagccattttagccaaaacatagccgaacccacgtgaattactaatgatcttgcatgcctttaaaaaatctacaatacttttaatgatattgtaaatcagatgattacatttcatcataaaagtatttttgtgttcagaaaattgtcgattgaagataatggtattcttaatatattcttaaaaagaaggataatgatatgtttaaagaaggaaacatgtgagcttttagattactggtaaaggcataggatacgagtcataggaaagggccatttttggaatattatgaataataaatttagtttctttaagacatgacatctttactgaatattattacattacccggaacggtagatagacttagagatttgatttgacagaacagaagatcgggaatctcttatttttcttttagcttgacaattggcataacaactacaccattttctttaagttttttgttgactatataacaaaaaaccaacgtagcccaaaaaaaagtagttcgaatgtttcgtccttgtttttaaaaagtactaaatttttacaaatatcctaggatcttcgtcatttgtggacgtttcggtttaatgacttaccgttaaccatttgactaaaaatatttcctaattatttgtttagttgatatagtttagaaaatacagagcatctaatctattccaaaagtttaaaccatattatgcatgactcactgaatagttaagtacaatacatttcacacgtgactatagaataagcatttagatttggcactatatccgaatatgtatacaaataagaatgtaatgtttttgccaaatcgtttcggggttccgaagaggcagccaaaacctatcactatctctctttactgttcttttcaacagtgttattttaatcaaaatatcttatactatcaaaccttcacataaaacgacaaaacttcatcctcatattttattttttgttacaaattgtaccttccaaatttcaagagtcctcttaccaaaaaaacatattttcacataaacaaaccttattaggtaaagacattttgagaagatttaaaatttaccacaaacatacacattttttttaccatttagttgataaagttttttctcaacaaaccaaattttgatgtaaaaaaaaacacattttctcatctgaatttggaaaaattgatcattgtatgtgaaaaatctaaaacccaaatgacatttttgaaaggggactagagtgttgagagagagagagatggtaaaaaaactctcatatgtccccttacaagttaagggtgtggataaaagtaaccacgtgttgcattgtcattgggaggttgtggccggaaatgtgagaatcctgatgatgctgctgcaactgagaacaatggtggtggttgtggtcccggtggctgcggtctcacggcgcttgtttgccccggtctctgccatccccagttactcatcatcccttcagcttcacttctcttttctgttgctcttccctgaaaaaacaaacattgtttcattgtcttgcgactacattgtgttgtttcactttgattctatgtttttacctcggcgggattattataactcgggcatgctccgttccagtaaaggcgatgatccgaggatccataaggaagaggtgtattcaccggctttcccatgtattcgttatctatctgcagtttgtttaaaagacgataagaaacgtacgttttgaattcatgagagattggtatttgaaagttagttaccctcaagctaactccacgctgagtttcataagtattagaagggaagtgaaagagcctcccattttgctttggcgcattaccggtcgataaagagattcccaagttgaggtcaatctcagagttattgctctcagagttaatctcattttggtatgaactcatctcgaagttcgtgactgcttctctaccattagtgttgattgcagccttgtcataagccctgttgtcaagaaaatgtttagaaagaaagaaacttcatgttggctttgataaaaacaaagtgaagttctactaaaggtttctatcaaacaatgatcattaaggaaccttgcagcttctacttcgctgtcgaacagcccaagataaatatacctgcaattcaagcatcttaatcacctaaccactacttagacaccattcctagtttcataccctttctaaaatcaaaaagttcatattaaagaacaaaattgctcactttttaccaagaaactgccccatcctagcttcccatctaccacatttgtgtaacgtaacccctcgatacttcgaactcccccgcgaaaaccccgtgctctgtctacgcagtatatgcacaaactcttccttactcaagttttgtacctaaacaagaagataacacagttaaaaaaaaaactactcaaaacaatcatataaccaaaacaaaagacttatatccaaaaacctgtttcatatcttcctcataatcaccaagagtaaagttgatatcagcatcaacacctctaaatttaatagcagctcgatcataagctctacaaaaacacaaacactaatcaaaatccaaaccttaacaattccgaaaacaaaacttttatctataataatccaaaaattacctagctgcagcatgagcagtgtcgaaaccacctatataaatcaacaaccatgaatcaataatcttaatcatcaaaattttaacaaaaattgtaatttacctaaataaacttgtttcccacaatccctacaaaacaaaaaaaaattgaatcaatctcactgataaaaattactaaatcgagaaacttgtattatcatcaacaacaaaaaaaaaaaacttaccaaatatgtgactcccatcgaccagttcttctataaaaagtaactcctctatactgtgaacttctagaccttggtcctctccgactctttttaacctgagccggaaccggagccggagtcggaaccggagttaccaatttcgtttctccgtcaccaatacggtcaaaagaaagatctatccagtttctagagcttgatgatccttcaacatctcgtagatgtccacagtctccactcaccggaaaaaactctttagtaacggaagctgaagcggcggggctttcgtctccgccgctactacttccgacttttaaaatatcgaaactgagagtgaaagctcgagtagagcaagagtcttcgtctccatcggcattgataactgacgacgtcgatgtaccggactcttccactcgattcccggcggagttgtctgatgtctgccgatctaagtatgagtcaccaccgtactgagtcgactcgggagaatcagcgttgaggttaagatccaacatctcaagctctgaaaattacaaatctagcgaaggtgatgatgaaggaatcagttgttagagatcgtcttctacagcaacaacgattacataatcacataatctctcacgaagagctcgagatgatcgggaggaagaagagaatggagaagaatttagagattacgatggaggaatggtgagagtagagaagttttgtcgccgggaaatgttaccggcggcgagagagtgagacggatattttttttttttaaagtggagaagaagatagaaggagacgtgtgagggaacatttcagacccaattttagaggatgatcattatttataataaagttgtttttctctctctgtaactataaatgtgtataataactttataataaaattttaacatattgttgttggtccttttttggcagtggtataccggctaagtaagtttccggttttttttttttttttttttgccggtacgtactgcttttggtcaatgctttggttttcaaaggagacaatacaatacatgaaatgaaacatcaacttttagttccgaccaaaacaagagtaatgatcgctgcagtattgttttttttaacccatgcttgttacattagatttttgtaggtgtagttgattcgttaatgttaacaagagtaaaatgtgatttggttcgtgtgttacatgttttttcacgtcgtttggtttgggttttggggtgacatagtgttgattgcatgagttaattaggaatgtacgttggtgtgttttgagattgagtgtgtgcaccaatttggcttgatggatattggtccaagtatgccattagaggatgggatgttggacttggacatgggcagatggtatttgagtcataggtctaggattagtggattggtatttttgattagtgtatatgaccgaggtgttattatagtgctaatcgtatgagtgaacggttgttgtattaaccactacttatatggttttgtccgcgatgtctttagctcttgtagtttcctcgtccttgattttaatgtcctatgataagcatattgttgtagaattgtgggtgatgagtatgacttatgtttgactttgtatgctaccatgagagcattgatcatgcctcagtgaagcgggggatggtgattgatgacatagatgatgttgtcaaactttcccgaaaattcgctcagaagattcatcgccaacacgtagtcaactacggtagaatcgacatttactagaaaatcacataatataaatttttttcttgtaattttgcatttagtaatctgccgttattaatatcttcgaaaatcaaatctcaaaaggttattatctagaacttttttaataagaaaattaaaagtattgttctttttagttattagttgaatatttgccatttttgatatagcatttggtattcaggttatgtcgaatcatttgactagtactagttttggaagtgaacatgtctcttcgtaagaagtagcccacatgcaatgttttcattcatacggtataattgaatctaccattgtagcgtgttgcatttttgtcccgagtattgatacaactatattatcacagcccatattattatttgattgatgtatccacttttaatagatctaattatggttaatcgtttcttttagtttgagaatagcatgaaatttttccggtcttaaatggttcggattcaagtttaaactctgtccataatacatacttacatagactaaaatccagtaaaaaaatcacactttttcagagcatcagatttgataccttctttaacaaaaccacaaatatataaaagaataatatatcaattaccattgatgtatcacccaccacatagcaagattgagatcgagaaattgaggatttagggttaatagcatacatctaaaacatgcgattgcaagctctctttcttggacggcattgtactaacgattgggattggtcaataaggtataggtcagtgatccaacggctgggatttactcaaatatagagaatatctgtcttaacgctaatcttaaaaaaaagattaggcttcatttgatcaataagatattatctacggtgttatccttatttcatagtctcttacatgtgcatgaagaacacgtgattctctcattatttaacaacttgtgtattgtatatagttttgttttcttctgttttctctttctcgtatgtatggatttttattttatgtggacaacgttactttacattatgtagagtaaaaattacatgtacactttaaactccaagttttttattcttgaaaataatatatggatctcaaacttgaacaacaatgtacaaagatgcataaaaaatatattatttcatttggatgattttctagctctagaacctaggataaattgaatactaaaaatgctacaacgagaaacactttaacccgagcttaatcaatagttgatgtcatatagttgtttgcctattgcttatttgtttttcttgcatggtcgtttgttcacttagttttctttatattgattaatgattgagaaaccataatcgactattttgatagttttgcttaattcatctatgaaatatgatgtgcaatcaattgatctttagtggctcgatacttattatagtaccacgacatagccaaccgtatgaggatcatcaatgcatagaagtttaatgtgggagacttgtgtctctattcgttcatatgtcacatttttatttatgtgttgataaaagagagaaaaatcactaaatagagatagtataaaaggattaatcaaatagtaacagactagcttaatcatttatcaaaacatataatttataaattatgataattgtatcgttagtgatttgattcctagctaaaattaccaatcatgcaaggaatagttataaacaaagctacttgtttgtatcattaaaatatctggagatcttaaaagaaagcaatgtagacaccttgccgacagggaaatatacaagtggaaaattaaatgttcattgtttaacataaatagttcgaagatgaatatggttaatttatttcaattggatgcggttgttgaaataatattttctaggatgcagttgctgaaaaaatttatgtttaggggttgtgacttgtgattcgatgactatacatttgaggaaacaaatgaataatctttaccaaaattcttacaatatgtcaacaagtcaatcaatttttaattaagaatttttttttacaatatgttaaaatgtttttataaggtgctattgagaaattttaaaactttaccgaatgttttggaatgagtcttaaaaacacatcttcgttaattttagcaaaaacttaaacattagaagggaaaatattgcaaattcttactactatatatttgccaaaacaaaatgatgttataattcaaaaaatgaggcaagtggttgaaatatttgacaagaaactaataaatacatgttttaccaataaaatctatggtgtagatttgtttcgttacatgggaaaagccacaatgtagacacgcacttcttccacacattttccctaaagatcctcccacattagttggctcccatgattttgacatttcctatcattatgtatcccattcactccacaacattgtttgtttcttcaatatacagtactcctatatttacaaattctttttaaaaaaccattgttatgtattactccactatttaggtacccatattttaggacggcagtattctcaaaaaaacggtacgaccaaatacttatctttagttttcatgcgtttcatgagtactacatcgtactttccgttttaaaagtaatatcacagtaccaattgttttcttcaaatatatataattgaccccatccttattaaacaaagccttttgttttcaattgaaaatttgatttttaacagttctatcattaccattcggatagattttaagttacatcatatgccatttttttttacagagtgttttagcaagaacggttctttgaatataaagaagatcgataaactaaaatagagaaattttaaaatctgttgttttattcccataaatttatatttctttttttttctgaaaaataaacatttttagaaaaaagaatattttacaaagatagatattttataatttaacaaatcagttgttcaatgtattacatttatcttataaattagagttgaaaataaaacaatgagtttacaacacaaaattatatcagaagttattttttgtgcaaagtataatagaagttataacgacttttcttaatacgtatgtaaaatctgactaagaaagtttacatactatattgaaaactggtcgacgtgaaaagaaaaagagaagaaattaatcataggttagtgttggaataaagaaagtgaaacatatgaaaatgattaaaaaagaagaatttagaaatgattttcttgctatcttcagtcacacaacaaaatacttttgtgccctttcccatcatggtaagtggtaaccaagtcttcaaccttaaaagatacataaatatataaacacttataaatctggaaaacgtaaattattccaaatttggttactcccaataatgggtctcctcgttacctactagagccggtaggtgaaccaagtgtttctttttttttattcagaaaaataaaaaagaaatattttcttattttttgtcaatttttagtgataatgtaaaaaatcttatctacccaataatgttatgccacgttgtggatatgccaacgtatatgatccaacggacgatactttgccctgctttttcatttatatcaaacaccaccattgctgatatgacacatttttaaaacaaaattcatacatcaaaatcacaccgaaaaaaagaaaagaaatttgatgtgattggtagcaaaatttgaagcgtaggaggttgaattatttcttccattgccaatcaaactgatgcaataaatggttaaatataggaatttaattaggttcttcaaatatatggttagaagttaaaggtttccgagcgggttgaaacaaaacaaattgatttataacaattgttttaaaaaatttattctcttgtattttcagaaaaactaagttaatttcattttaattatttggtcaacaacaagatatattaaaattttgggtggttatccaaatcgaaagaaaatagctcacaaatgaataagtactatttttaagtctactattacgaatcaaaagatcaacgtaaatgcttgaagtacgtaaaaacaaagacgaaattttttaaaataaaaattatctcgaagaaacaacaacttatcctgaagattccatatggtaaacaattatgaaggaacatggtgatcaattttggattggacaaagttacaactatgagatttggcaccctttagggcctattttttcttataacattttcatcccgttacttacaaaatttcttccttaaatacttccaagaacatttgagagatatacgaactttacttggtttactaatatagaagtgtttgtcttaggtgtatgtgaagaactatgagcattggagtctaggctcttaaatatcatgataaatacagaatgattttgtttatgaaacaattgtttttcctgtaagatcaatactacagaaaagaggatatataattgatgtcgacaatttataaaacttttcgaataacggatcattgttgatttaggtaacgacaaactaagtgcaaacaaatttttttgaaaaaagacagtggaggaccttacaataatacactaatatagactatatagtattgttaacatacgtgattctaaagaagtttcaaaatcatcctaaactaacgaagaaacaagggaccattacgcaattgatatattaaaaaaagaacaaatggatatcttttgagaatagagaagaatatttaataaataagttatgtgggagggcttgtagtgcacagcatccaacatgaatgaatacaaaagattggacaaaataagtaattttctttataattatttagccaagtacaaaagcagtgtttcctttaatggttagaatctcttgtcggcaagaatagtgtacgaggttttcaaatctctatgggttaacgtggtcgtttcctgtccgttcatttctttttcttacagccttttttttggggtaatgaactttttgttctgcagccaaaaaaaaaaaagacagtctgtttcttttttttgtcctaagaaaaaaattaacctttcaagttccaacaggcaacagacacatgcttcagttttcttcaccaaagattaatgatatgaataatttcgactccagatttaagacttaggaataccaatatgtgaaatattgaacacgaagaaccataaaaggattatgagttagatcatctggtttaacataatagtgttattgtttttataactcttccaaaattatgtaaaagatttaatatttcatcctaaatattgataatatacgagccataattttattttctcaaaaataattaaataaactttattgtttgccttattttaataaaatggcatttttataaacacaaaatatagcccaaaaattcaattctgaaatttgaattcatatcgaattatataacctatctaccgaagacaagaatattaatcatttatattatcaatttgtatctctttccatcctcttgttacatgaacttgacataacatgccaagctaccatcatgacttaataatcatcataaagaacatgacaacaacgaaacataattcgtatgaataatttcttgaatcactctgaaaaacgacaaaacaaaatatcacactcaaaaataaaataattcatttgaatcacttttaattatctcgctctgaaatcactcaagtaatccaaaatttaagtttgcttatcttcaaaacaattcccaaagtgggtctgaaggcacatgcagacataaatcaattacataaacgaagataatatctctctttatcttgaattttttttatcaattgttttggacatcacatataataacatcttgaaagataaaaaaaattataacatggagtaaaaaattgtatgtgatgattatgtaaagagagagtctaaatgtactatacacattttaaagaaaaggatatatgataactggttcaccccaaacatgttaacctcacaaacattattacctaatcaactcattgcctccaacaacatttatgcgtgaatctattatattacagatgtttcaaatattatatgtaagatacgaattgaataagattattagttcatcaaaatccaaatgcagtggatgccatcaattaaaaaacgtatccaatttaaatttagtatctttagtgcccatgaagttttctagtggcttcttaaaactaaaataacgataaaagaaagattaatataataatcatggggcatggaatatgatgccatccttgaattaagtatatatgattagccgggtcatgtaaaatatcatactcgttagaaccagatttttcttgatcacttgcggatctttttttgttattggatttaagaaaagaagaacccgacaactgtctagaaatatgatgttgacatgaggtttttccaatatgtataaaagacataaaattatttgaccttctttattgattacaccaatttgcttaaatgaaaaatgtaatcctatcaaaatcaagctaccttaatgttgatagtactttacgagttgacgtgtagagaagacttgacatttaataaagctcttgctcactgatgatactaccatctgaaagatccaatccgaaaatgagatttgaggacattactattaatgaaaggagagagttaaatcttattaaagagatgattaggtcgctagcccaataagttcaaacaactctttcatttttcatttagttactatcacttgcaaaattatctacagttttcttacctttgagttgatttagtttcacatcaacttatctatgttagcacaatttcaaaattttaacatgtaatggagcagattaatttttaaattgggtgttactttcaccgattttccatacttgtagtgacttacatttgctgattcattctttcagaagatgattcccataaaattgagtcgaccagtggaatattagaaaaatcatatactaaaaaagtgaacgaagataacaaaagataaaccttgacgtcctctttatcaagtcttttcttgtcattaataaagtaaacctaatttcaactttgataagagccaataaagataaccattttcttcgtatgaacatacaaacaaaccatttaccaaaagcaaagaagttatatagagtgcatagatctaacttaccaaacataaactgaatattgtgagacttaatcatccgtttcattggtaacatggaagcctacatatatacatcaatgtctaaatataagtctttcctaataaggttggattgagaactaattacttactatagtgattatttgcagcatttggaagttgatgtagttgataatcgtaacaggccacctttgcttagctacgagcagtccccgtgaaaatttatcatgtcgctgtgccctgcattctcctcatcattagtgttaatctttttatactgtaatattcactctacctcaaaaggttatcaaatgcatcagaaggctaatgacttatttcaacagaatctctttatcagctcaagttggattcatgctaaaatgtgcgaaataaagcgacataatcgggatcaactatacctcgagcatgaatggtgttgattcctggacctttcagttcagtcccgttgtcgctcagcaatgaaatcccagctgatgttatatggaacgggaaggctaaaggaggcgacataggagattttgccaccttaatgattctctgacctgcaaaaagcgtgaaaccaatcccatgaacatacattcttggtagttactgagaccttacaaatgctttacaaagccttgcctgacttggcttcaaggaccagtcggatggttacagcatgagcccagttaatccccaatgcagcaacaaggtgagaatcatatgtctttgtgttgtctttgaattcatctttaactttagctgttgcagaggaaatctatgattgtggtgaatgggaattaacaaggatcacaaaaccttataaagatacttcagtttctgtttattgtaccttggaaagaatactgactagtttcatcgcggttttgagatctaacttgattagtcaccactataggaatccgtgaaaattcagcaagcgatctggaaatgtcagagatcaattttaatcaatctaacagatgaagtatggatgtgaagctacgttacaagctttgagctgacatgagactaacgttcatactttaagaaagagatatgccaacccaactgaggttgtctctgagctcctggtttgttttcgctgaaaagcaaaataccttgttactaaggtcaccaaaggagcaagaatgatatgacaatgatcagcaaggaaatagaaattagactaaccctgaaagaagagctgtcatactatcaatcactagaagctttacttggttttgaagaattgaattcttgagttcttgtatactgccaattagaaagaaagaattttatatactaacaacgtttcagtgatgcactttcgtatttcctttaagtttaactaacacaatgatgagcaaaatcttacggacctttcagtaaagttagctaaagatgttggacgcaaaacaaggattcttccagccatctgcactgcaaatagttatatgtaagcaatctggaatatgagaagacttaaccaaagacataaacacaaagaataaaccatatagctgttccacacacaacctcttgtgccattcctttaagatgaaacacttccggaaagctttccagtcccatctctatcaccctgaaatatacattctctgaggactatgcacataaatataccatgtgagaaaaaacaaaaaaaaacagtttaccttcttgaactaaacttggattccacatctatgtatatcacacgaccatctaatcctccataagctactggaaacgaagctgataacgcaagtttcatgcaaaactgcgtagcagagaaaactttttactgtatgcaaacacaccaaaggtaccaactttcaacttaactatacaacaatgagacataataaaatcttcaatcttctaagaaactaacctgtgatttaccaataccaggaggaccaactaactcagtaagaacaccaaaaggtatcccaccacacaaggtatcatctaaccccttcaaatgtgtaggaagatgacctgataaatgttcgttttcgaccttcttctccagtaaagatcgagcctttgaacacattacatgaacaaaaagtactctagattataaaagcatatcaatcatataaagcaaaaaaaaataaagagcttacagattgacatggtggagaagtagcttcactgatgaatgaaattgctgatcttatctctttcattccaacatctaacagctccattagttcaaattccgtcattgataatgcatcctatattcaattactattatacccaaatttcgaaaacctaagacatgattgaatcatcggagaatataaagaaaaaccttggcggtgatgatgtttcttgcagcgaagatgtttgagattttggtgtgaagacccatttctccgatgagtttgtttgccattttttgttttcgtctccggcgtcggaaatattctttagacggtgaagagattagagaagcttctctttctctctcccgccaaattgagagtcctttccttactaaaccatattgggccttaaagagatgattaggcctgacccgttttgtattatccatgacccggaccatatttaagattcgttttgggccttttgggttttgccgttttggctatcaaaataaataatattttggcgaaaaatttaaaatgaataccacattcataaagtatatttttttgtttgtaaaatcgattttttttttttacaattttatgccaaataatgtttactaaaaattataatatattatagcttttgtttcctgactatcctttatgtgaaaatttgaaatagtaaataaaatttgagtgaatggtaacgacataaactcaatttttgtttgaatctatgaatgcattataaaaaaatttgatcgaatagaaaaatataaatcttaataatgtataaacaataaacgttgatatcattgttgaccaaaaataaaacgatacaagccaaaagatataaataattaagttgcggattctgtttatattgtaatttttattgaacttataataatattccgaggaactagcaagtctttttcaaaacattggatccagctaagcagtgtatctttgttaactctggtttaaatttgattttgagtagtttatatttgtttgatgtgctttgaacttttaagattttcttatttggtcaagtataaaagaaggaaagtggaaaaagtgaaggaacgtcacaaataacgtgcatgattagtatttgataaaccaatgacatattaatatcaggattaatccacagaaagttgaatagacaaacaactacaataaaatttaacattttaattatagttgttgagtatataaataaataagatactctttgtagaggttttagtccaaccatcaaaataaaaacgcgtgaactttaaaaaccaactcagaatatgacaatgaaagagttaacacaatcaatctaatgggagcctgaccattggattgggagaagctatagtgattgatgagctttgtaagagctacgattcgtcacatggtttctttttggccattgtgaacgttttaaaattgtatttcactaatcgtacttctaggtacataaaagtgtatacaactagggaaactcattaagctatacaatccaaaagtctgagctagtgataaatggaaggacggtctaattaatgtgattcatgtttggatgatttgaagtcatgaaagctcataaaaagctttagaatggggtcataccaattcaataaggacggtggatgaagtctttttgacatttttgttggtccacttaattatattatattgatgaattcgttatatgagagtgatactttacaactacaatgaatttcctagaatattcattcggtaaagttattaaaaattcgaatatataggccaaaaaacaaatttgagaggttaaaaatactaagaaaatgttaatggttgtggacatgacgaaaatgtggctcttgatctgaaattcaaaatctttgtagtaaaaattgaatatgtcgcttgtttggttaataaacttcaaatgcttatttttgtttttctaaaaaatctacaaaaattggatgctgttaaaatgataaatctaaatgcaatctcaatgtagaaaacatattgtctaatactacacaaacttgcggtccaaatggtaaaaccatatactatacttttaaactaccagattaaaagcaattacatatttaaacgtgtttaaatcactttacgaaatacatttttctctatggtaagagaaaacaaaagaaatgttttctttcaccaaagtcaacgaccgaacttgctcgagactttcctttcttcatctagaaactaactaaactaaattgtgaaacaacccaaaaagctaaactaaaataaattcacattatctgtaaaaaactaaaaacacttcatattgtcactaaatcttactacacatctttagtgatgcaattttcataacattgaagtttggatcatcttaaatcttaaatatatgaaacgttatcatcccttagactaaggttcatgagtttctaattggactagtctatatatgcaccaactctatagtttattaatgaaaatataatgaacattatattttgttttaatatgaagactctcttttgtttccattagagtttggcaatggattttaaataagatgattcctttttgttttatttcatttatcacttaccttgatctacttcaacttgtttcgtgacttttaggtgcatgaccccaagtattcacacacacacacacgtattcataagcttcttagaacacctccagtggtgtttcttaaagcattcttgaatattcatgacaaaagtacaaggtattataaaatattaataaaatataatatgtgcccctagaaaccattgacccaccatgcattctgaataaacaccgaaccttaccacatttctgagcaatttttccacagaagaccaattcctaatcatgtttaataattaattaatttggattttggagctatctttactctttctttgcctataaattaaactccatctctcttcttatccttctacttttctttcctcttctcagcaaaaaaacatttttagtaacatttgttctaataagaaatttgtctcttgctttaacaagaagcaagactagccttatctgtacctttctttctgaattaaagaaccctttaagattcatatgattttcttaattcttttttatatatgtagatttgtttcttaaacactatatttatgttttacaataattgttttatatgttttcaacttctttgtagatttgcttcttacacacactaatgttttatctttgcagagaaacttgacatttatggagtctgtgaagaccaaatcctccaccgcgaggagcgttgagctaccgcctcgccgtggaaaggtgaagcgagagatctttggtttcttagccaattccattgtttccgccgccgtgaaagctggtggatcgtttaggaggaacggcggaggtggtggtggtggctcttcttcctcaaccaccactcctccagggagtggatacacctccgaccagaacaacgaatccacttaaacaacaaacagacataaagacataattatgaaagtgccaccaccatggcactcttgagaagaaagctgagtggttctgttcgtttttgaaaacagaacgctacttttttctccaagtccggttcggttttatggtggtttgttttcttatgtgtggtacgacccggtttaacttcgtttttttgtgggttaaactgggaatacgtaatggtgtgattaatttgcttttgattatgttgtaagcaaaaatatctccctaatttgttgtttctacgtgtttttaaagtggagtaatgatgtcctctgggagatatttttgatttggtttgggttgggtttggtttggatttaattatgtaatttgtatgctctaagtgtctgtttgagtgtttgtatcttaaatgcaatgtataattaagtgtgtttgattacttttattagcttctttctctttttgagttgaggaattttagaaatagtaaaattacgtcaaaaagttataatccttaatgagttaatgttattacaagattgataaatggtaagactattaattctactaaagtaaatgataatatttagcaaataacaaaaaagatacagaccaaaagtttagaatgaaatttatggatcaattacgagatcggcacaattaaatgtatgcctttgtttaattaggtactttttcatatgcttatagaaataggtacttctctttctgtttatgttaggcttttacccttttgcattttttcttcatttttccagtacttctctcaacggtgatgacaatgaattccgttgacaataacgaacaattttttggtttagaattagtgatgaattggggattaattgatttgaatcgtttttaagagtagaacccttgggtttcctagatagtatccttaggatttatatttcttccataacaaatcgtttaacttgattgattggattaattggagacgacgtgttggtgacggagaaagttggaaacgaaagaaatagtgtttttgatggacttaaaggtgatggtgttgacaaatatggtgtttatgaagcaagtgcggcagtgagaagtgaggattgaggatttgagttgcaggagaatttgttaaagacaatggtgttttatcaacattataacctcacacaaggggcaaaaccatcatttttcttaccaatatatgcttatttccataaacccattcaaaaagttcattttttctaattattgggccaaaatgtgtccaatcttacaaaagcccctgaaatttatcttacatgtacttttaaagcattattcatttgctgtaattatttaattttgttgttgggacatagttaataataagtttggtgaaaagtgggatggctagcttttgcctttttcaattgtttatttttctcaaaatttataaaagaatctaagacatattttaaatgcaactatacaagtcatacttttccggaaaatagattactagtcaataagaaatcttaaaatcaattatttggattcttttcaaatgtgttcaaattttaccttcaatgattattttattggttagctaattatattcaaagtgcatcaagatatgttactaaaactaagtagactcgagtaaacacatcgcacaaatcttcttctgtaaaccaaacggttatgagtagtagggaatcagaagacaaaattcttatgcataaagtatctttttatatatttcattttttttttgttttacatttttttatgaaaaaaaccccgatctataatcaatatctattacgtggataatataatttagtagagtcagaactccgataaagaaggtagaatcaaatagatttaacatttaagtatttaactaaaagtactaccatgtatatatttcaattgaaaaatgttatttcaaaaagtattatcgtatatgtagaggttgatgatattcaaaacttttttaaaatactatatcgtaattaagtatcatttgaaatcaatcttattttgttataatttgtcaaattttggtataatccggttatttaaagaaaaaagttatccaagaaactgatcagttcaacatgaatcgaaccaaaattcttgtgtaaccgaacactaataaaaaatatgtctattggttcagccaagaggattgaatccaaactgaaaaccgaaaatgtttgttcggttcgattttggtattctcgattcgggttaaaatcgcaggatcctaatagctcctatccggttataaatcccattggactaacaacaattgagaaacttttgtgaaaaacaaacatcatatgatccaatgtgttccgcgtttgtgattttctatttcttcaatcctgagtcctgacagcataattctttgcctcaaataaagaataaaaaagttgggatgattttgccgaagtcagaagcaatataaaaatgcttgaattagattatctttcacactcacgtcataatagttctctatcttccttttgtaatcttatataaatctgtaacctcgtaatgttacaatccatgcacaactaaataagttcacagagcaacggtgacggtacacatgatccaggttcgagggaaacaaaatttatttatgtgtgttttcaaagtttttgatgtttttaacccaaaaaaaaaagtttttgttgtcgtcttctagttgttagtagtatcagttctgacttctgattatatgtaattcaaatctttaacctttatttcttcaatttaaacaacaaaaataaaatatctgaacattaaaaagagtatatatctatatatattatttggtatattggtataatatgtactttagtgctatttttctttattataagattttatttcatagagtacaaaatagtgttagttatttctaatgttttagaaacaatattttaactttatataaaattctattagtattatatatatatatataaatagttgttagctttatttacgatccatatatattaaaaacgtctcatttttctattcgtgttagtttagtcctcagaatctctaggaatggtcatgaagcgagagtatataaaagacgacgaggtacgtatccaatattgataatgcatttagcaggttcatgtgtgttaagaaaaataaaataaaaataacatattctaatccctaggaattttagctagaaaaataaaataaagtataagatgataaaattaaactaaaaaagaaataattacaatacagaaatttgatattttctaattatctattaaattactatagctgaaaatcataaatagtttaactatatgttatttctcttttaaatatatggtttgttaaacaaatacatttaaatatgtgtatatgtatatatgtatatacaggaaataaaatttatttcttaattgatgtttgttatcattttcttgtcttctactagccagttagtatattagttctgaccatttataattcccctctctaacctttattttattaatttaaaaaacaataaatatagtatctaaacactaatatgtatcataaattttgtaaatcaagtctcctggcacgaccctgaccgagatgttcaaagacaaagaggtataaatactatttggtcctattatctgcattttagtgttatatttcttgattataaattttattttatagattaaaaatagtgttaattacctctattaattttaaaaataaaacattgaactttatttacgatgcatatgttatccgaaataatattaacgtttcatttttttatttgccttagcaccacaaatctctcggcaccgccctgggtgagatattgaaacacaatgaggtatgcatgtattcaatattgataacacatttagcagattcaattgggttataaattttattggaaaatattatatttttatccctaagaatttcagctagaaaaaaaatatgatgataaacttggactataagagaaataattacagcatacagatttgatattttctaatcatttattaaaatattatagctgtacatcatagaaagttgtactatatgttatttctcttttggttatatgactattgtttttgttttggtagtttatatgactattgtttgtaaaacaattacatttatttagttttatccaaaaaaattaatcgttttttttttttggcattagccctccacatctctaagcacagttctgggcgagatgtttaaaaacaacgaggtacgtatttagtaggttccggtgtgtgtgtgttagtgtgtatgtgttttttttttatcaattgttgttatactattacttgtaggagaaggaacatattttttcggatctagaacgaggaacaatgctaacaagaccaatgggcgaaggatatattcaatatctacggctttctaaagagacgactcaaccggcggattctaagattcccggtctttggtcttcttccgttagaccagagttttgttgcatctatagagtaccagaccggttacgcaaagtgaaccccgaggcttacactcctcaaatgctgctaatcggacctcttcaccattccaagaaagctgaagccctcaagcgctacaaaaccgatttaaggtaacaagtaacaacatagtattttaactagtattatttttgtttgagacttatagattttgcttaaaaagtcaagctaatacgtatggttaatctagatatttgaactatctgaacatggagcttcacaagaagaagtgccttgatagtattgcagatatatatggggatcaacctgtcaaagagttcaggagaatcatcgaaataaatgagaaattcataagagatagctacgccgagtcaacaatatggatcaatactaaagatttcgtagaaatgatcctccacgactcggtgttcatactattgttcttcattcaaaccggaagtaccctaaacttcaacaagaaagaagatattcttttcaaccagagtcgtctcataaacgctaccgccattttagaagatctaatcttgctcgagaaccaactcccttatgcccttttagagaaactctttgaacctttttcctcaaatgtcaatactaaggaaacgtttcgtgatattacccttcgagcttttaggtttgagggaaagatcaaagaagaagtgagattccaacattttacagatttgtttcggtgtgtccgtgtcagcacactttctttgacagaagaacaaattaacatagcaaaaaacgagccaccgaagagcagaaagattatgtacaacgcagacaaactagacagtgcaggagtgaattttgtgaatgtggatgaagaaaatgatttatcgttggtgattactttcaaagacggaatcttgaaaatgccttgtttcacagtggaagacaacaccgagagggtcgtgaggaatttaatggcactcgagcaatgtcattaccctcgaactacttttgtttgtgactacatctccttcttggatttcctcatcaataccgatcaagacgttgacttgctcgccaagaaaggtaccaagttggatattcatattataagttaccgacgtttttttttcttcttctctcaattctaagatttgtaacaaattttacgttgaaaggaattgtaaagaactggttaggacatcaaggatcagtgacagaaatggtaaacaagctatgtttagggctcgtggatttcggatctcactatagcgatatagtcgaaaacctcaacaaacactacgacaatcgtctcaacagatctgtcggcactcttcggcgagtttatttcaaagatctttggaccggtactgccaccattgccgcagtcgttctccttgtgttgactttaattcagactgtggcttccattctccaagtgatgatgcagaacgacaataagtctccgcctcctccagctccgtcccggggactatagattgtttcttgttatatacgaaaccaaactatatttgtcttttttttcccacacaaaattatgtttaactgtttttctctttcaatcgactttgtaaataatgcttctttttcacgttgtttagttatcccaccatagctacatcatccatcattttcgttatgtatcttcaagttaatcataaagtattgtttgcgttcaaaaagttaaatttctttctctcattatattacttagttttcagtgtgaatttggaggggtgcaaataacaagaaaatttatgaatgtactaattaatcttttgagtcttataaccaaaggttctatattttttggaatcaatattgaaaaaaattagtttgtaaagtttaatttcaggagaattagctaaaaataatctttgtaactatctttgtgaatctaaaaaaaaatgtgctttgggaggaagtcatccaaccagtaaagatatatttaataacaagtttagccacaagtaaagcttataagaaaggtgggctttattgacagttcacaaaaccagaggatctatcacttttctaaatcttttcaagctaaaacttataaatggtccatcaaaaatcagaaatttttaatatttggtcagctttatgtgttgtttagtcgtacctcttaaagcaataagagttttgtaagatggattatgctctaaacatggccttatagaaaataacaaccacaccagtttttatgtccgtcaattcttcatacataagcttcctttccaattccatcaactccaaaaataatcttagaatgacaacatttaaccattttgactctccacaatgtaaatcaattcacgtgaactttgtgatttatcttttaaaagacacaacatagaaaaaaatctcttccaaaatttggatatattaccactcgaagtggttaaccatgccttaatcaaatggatagacctggtttcgtcccattagaaatgatcttcatcttccatcgttataagatacatgccatcaaaagctacatgatcctcctgatgatgaagtgtcgacgatatggttcatgaaacgcttccaagacattcaagcaatgaagaatgggcgtgatagatacatgaggactctctagtcctttgacaacgtatatcttctcataatttcgtgattggtgagctttaagaaagattagctaattttatgacaaatatcttgacatacaaaaaagttttgacctagcagctcccacaaagtcacatctcactttgacttactccacaagacccaaatttaactacacgcaccttattggtcactattaataacccttataatacaccttcccgtagacaataacttacgtttcttcttcttcttcctttaaaaaagttcaaattaagcatctcttctctcactttaccctcttctctctctctgtctctctttctttttccgtaactcttcatcttcttttcccagatttttccgttttccaattctctgtgtctaattccaaacttcctaggggttttttctccaacgtgagaaaaaagcttctagctttagcgatgggatgtttcggacgcactccgaaatcgaacaaacgatcagataccaaaaccacgaagaacaacgatttcaccccaaaaaaactcaccgtcaatgcaaatcgagataagctgacacaacccagctcaggtatcgacttgatttcgcataaaaaatcgatttttatttcgaaatttagaatcttgcgataattaggttttgtgttcttaatgttgcatttatggattcgttctgatgtgtttgttgttatgtctttgttgcgtagattgtttaaaagttagtatatgtggagatgtaagcaaggagatagttactaagaaggatcaattagctttggatgctaaagatactaatgttgaagatgaagttatagtgaagaaagcacagacttttacatttgaagaactctctgtttctactggaaactttaagtcggattgttttctaggagaaggaggttttggaaaagtttacaaaggtttcattgagaaaatcaatcaggtttagtatttgtatcttgatctaatgagttacagtgtattgtggctagtttggttagaggttttaagagtttgtgaatggtgtttcgataggttgttgcaattaagcaacttgatcggaatggtgctcaaggaatcagggagtttgttgttgaagtgttgacattaagtctcgctgatcatccaaatctcgtcaagcttataggattttgcgctgagggtgttcagagactgttggtttacgagtatatgcctctaggatctctggataatcaccttcatggtatgttatattggtattgcatcacattgctttattgattatgttaacttgttttcgtgtattctgtttggttttagatcttccttctggtaaaaacccgcttgcttggaacactcgaatgaaaatagcggctggtgcagcaagaggactagagtatctccacgatacaatgaaacctcctgtgatataccgtgatcttaagtgttcgaatatcttgatcgatgaaggatatcacgcaaaactctcagactttggattagctaaagtaggaccaagaggaagtgaaactcatgtttccacaagagttatgggaacatacggttactgtgctcctgattacgcattaactggacaactcacattcaaatcagatgtatacagtttcggagttgttcttttggagcttattactggaaggaaagcttacgataacacgagaacacgtaatcaccagagtcttgttgaatgggtaaagactaaaaacatctctttctcctttttctaattgagcatcataattcacagttttgactgtaatgttacaggcaaatcccttgtttaaagataggaagaatttcaagaaaatggttgatccgttactcgaaggagattatccggttagaggattgtatcaagcacttgcaatagctgcaatgtgtgttcaagaacagcctagtatgagaccggtgatagctgatgtagtaatggctttggatcacttagcttcttctaaatatgatcgtagtcaccgtcaaaagcaggataatgtgaccgagactaaagtcgatgaagagaaaacacttaccacagaatctaatgtttgtgtggaggagaaacaagagatcaagatatgctcagatcaagcaacttaatcatcaatgaggattcttaaaattttgatattttcttgatttgtagaatgcttcgtttacgtaagcaacagttttgttcgaatttcgactcatacttatatagtaaactgtagcaaaagttcggtttatcagaatcttaaaccattacgtatgggaaagtccggtttatcaccaaaccagtttatggaaacgaatttgtatgatgttctaaataacgattttaacctcaaagctt

SEQ ID NO: 300 - DNA, 74494 bp, Arabidopsis thaliana
aagctttataacttacgtggataaacttgtcccacataattagatttaagattgtgtttaaatgaactaattattttgactccaaatatgtctacagttggagctttccatcgaaatggctgggacattagcgatatgagaatgtgaagaagtgagaagataccttcagggagatgtcatactcgcttgagagtcagatcaaaacttgttgatgtcagcaatgctttcgtataggaacgttgttacggatgatttgatgaaccatcctccaatggtgtgagatggtccgatgggcaatatatcaaaagaaacatgtatcatttctgtttcctctttgtccgagagttgtttttgtggtatggatgtttatttttcttgagtcttggcatgagctcttgtaatacaaccttttattcttctcctttcgtttagtttaatcggggtttaagcagaccaaatgtcaaaatgggcttaagattaagtccaccacatgggctatctatcatgtataatcatcacattgttccctttcaaactcaaaagccatagccgttgaggcttgtcagtccatattatgttccttcagtggtgcggattctgtttttttttttttttttgataactggtggatgattatttttcctaaccccatcttggatcactccttccatctacaattaaaaaaatagacacaccatattgtaaatactaatgtgaacatatacaattttaaaatataatttgaacttaacctcaacaaataaaactttgcatctcaccaatatgctaataattatcataaagtatatattaaataaaatatttatcatgaatgatgtattaagtaagaaatttatcctaacttagtattaaaatttgtagtcaaatagccagcaaaatgacaacgtatatgtggaccctttaattactatataatcatttgctttacagtaaaaaaaaatataatacacgtaaaccatagcaaaaaaatcatctagtgtagtcatggcaagaaaaaagttaaatctaacttacattttcaatgatagaatgaggaaaagatcgttcaagcagaggagagaaggatttctgaagaaactcaatgatctcaaggttttatgcgatgttaatgcatgtgcggtcgtctacaatccattcaactcaaatccagatgtgtggccatcaaaatcggaggtgaataatatcatcaagaaatttgagatgttaccggagacccaaaagaaagttaaatcggtgaaccacgaagaatttctcaatctatacatctcaaaagtcgaaaagcaaagtaagaaattaattgtagaaaataaggagacttgcttaaaggaggtcatgttcaagtgtcttggtgggaacatgggagattttgttatgaatgataatgatcgtcttgacttatgtaagtttattgatcactatcttagaaatctttatcatcataaaaatgtaaccctcaacaatccaaattttgaaatcggagaatcttcttcattaatggatatggcaccaaccgctacaactggaaacatggcaacaactgtagtagatgaaggcatgacaccacttcttattgctgaagggagttcctcctcatttttgaattctccactcttcaactctcctcagctaaccaacgagttgcagcttatagtctctcaaaaccatagattagagaattctctggcaagtaatctctttttcagtgaagggcaagacatttgcattccagatatgaatcaggtttgtatgttgtaatcattttatatattttacatcaaaatctatttgagttttctaatagtatacttttctcaactaaccaaataattgcagtccataatcccatcaaaccaaggagcagaacatgtggattttcttgaaagtaattttctacctaataacaatcaagaagtttatatcccagttatggatcaggtttgtatttttttatcatcatctataattttaaatcagaaatgatatctattctagtcttcaactcttctaaactaactaaacaattgtattatctctttaaaaaagggatcagagacagttttttttttgcaaacaattcctttctaaacacaaccaagaaatatacatacactcaagttgtaatttgactaatattcatgtagtttaactcattgttaacagaaacatcaatattgttatttgattgtgtttcaggatgaagtttacaatccaaatcaaaatcattatgagaaccaacaaggattcattgacgagatgatgaaatatgctgagaaaacaagttttccttggatggtagagaaccactgttataatcacaaccagtaataacgcatatccatcaacgccgatgtcaatgccaaaatgttatctttgttttctttgtcgtttttaataaattttcttaatgacaatcgttgaatctgatatgtcttatcttttagttcatcaagttttggttttctagttaatatgttttctataattattattttgaagaaattgattaatatatttttattaataaatttaaagccagattctgtattttatttgagattttatttttatttctgtttgacttagtaaaattaatcttcaactgaaaatcaagagtgttttgcaaattcatgaaaaatgttaatctaagagtttaaaaagaaaaaatatataaacaaagatgaccaagagacttcgttccatcaaagatgatttgctagaatcttgttgtagagaacctactctactaaacctaagaatgggagaaccctatatggaacaacacaagatagaaaaataagcaaaatatatattagagaaggcatgttatcaaagctaaaagtttgttatttacttaaaaatatgtatcctctccaaatgatatattccgcctatagtctccgtcgagccgaggcctcctaaatcttcatcatcaagagtttaaagcttaagattttgtttttgaattggtgggcttggccgttttcttactaggcttgctactttatttattgcaggctcatttaattttaataaatatgaatagagttagtggaaaactgaagttaatttgataaatagaatttgacttagtttgaatcacatagaatgaatagtatactacttattcaggttttcacgttttaaaaatattattccgctattttttaccatttacaatattcatcaggtttttatgttttcacattttttaaaagtgaggccaatttatacaactcacatcttaaacatatgcctagaaaaaacataacggtttttagcgttttataagtatttaactgaaacttaatatattttttttttgttaacaattatttagttattttgctatatataattctgacatacgaatcagagccatgataaaacctgcatatgaaccaaacaaaactaaaattttgtttcatttcgagtagtttacgaataaagacaaatatgaaataaaattttataataatttgtagaatcggtacatcacaaacttttaaaatctttggtagcagtgcaccagtcgggaacaaagatgaagtttacgagcctggaaattctcacgagcagtgatggtcaaaacattacatccatgttccatcttttacctctttctccttctacttaagttaaagaaaaaatggtgttagttagttttaatattgtcactattttcgtcaatattatcttactatttgatttccagattatcaaaggattgattaaatagttaaatttctttaaaatatataaatgttgtgtttacacttgcatctattttttttgttttcaaattttaagttattatttccatactttttggcttttaataacaatttattagtttttattcaatattatacaaacaattcaagattaaaattttgtattttgcaaatgaaaaatcaagattaaaattttgtattttacaaatgaaaaaaaaatcctgaaaccataatttaatcaaaatatatatctatatgatcttgggtttttttataaaggttttcaaaaacatttaattctataatgtatgttgaaaagatcagtaattcacttatgtctaataaatgggaaaaagtcagattgtttcataactaacctgaaaaacaaaatcatggaagtacctttttccgaaaaaatggaattcttttccgaatcttttgacatatgtatggtctttttaacctcctaataacccttaccaatgatgaacataactgaaatatcactcaccaacatcattacaacatatgacctttgcccaattcgttcacttttagttcgttattatggcaaccaatatcaataattatatcacttttcttcaccaggcgatttaacattcccactacattacaatttagaaactcccctttccttttttgttcagctcattgacgtacggtctttataaataaattgttggtgtatttttcagactactaataaagctacaatacggaatagctgctggcgatgaaaaaactctctttaattatacttgagtaattctatacggaattagctactagctacaatacttcaggagttcgttttttattcagggacaaagaaatcataatttttttttttattatagaaatatgaactatataagtaggagtgtatagagatttttttcataagatttttttttttttaacttcaattaggtctctagaaaacaagatttcttgcaatgtcctagacaaagttttcctttttcacacaaaatatagaaacaaattgctattcaactttccgatgtgggaaaagtttttaacaaaaacttaaatgaaaaagttcctctacaaaatagatgccaatggccagcacatgtaggaaaattcatatagcttctctcaaacgtgagaatgtcttctagaaccaaacttcgaatttaaatccccctcaagttcaatttgcagatcacattctcaatggttactcgtattgttgaacatttcatgaataatatggtttcggagccagttttactttctacaaattttttatagttgagttaaaaacttgattgcttcttctttttgtcttttcgtttgcggttacaatacttgagtattgtcaaattttccgctattcaactaaatgactcatgagcttatcaagtttatcccagctatttaacttcccatgtttcatatatagcaatttattaatgcttttaaaaacccaatcatcatacacttgaccgctttttattattttaatctataaaggacgaacctcatttttgcatatgattatcttttactattcttaacgcctaaaggtatacattctccttatctctgaagaactttaaaaagagtgagaacgaaactaattgaaaaaaaaacaaatttgataaagatcttctttaagtgtatcaattttaacaggatgtgccatatatttatgggtgtaggccaaatttggtgacaaagattttaaaagtattgcaaatttatctcgacgtagatcgtcacacgatgtaatttttttgcttatgatgataagaaaaatggattataagtattgatctaactatgaggtattgtttggacgccttgatcatttgacaagagtgtggttctacaattgtattggtgttaggacgaaaggtgtgaagtgtaaacttgctacaactatgtgtagcatgtggcgacttgatcacttaaattttggtccaaatactttttatgtgtaacgggtttgcggacaattcttgtcaattgatttcttcaccataaaatttaagtgatctcggttacccaatgttatatgaaatttttaaaaactatgaataaagttgcggttaagtggaagagaaaggatcctaagcttttacttaccatcatcaatgattttgtccttcaaaggctacaaggacgtatatatgctggcggtgtatataaataaagaaaaatattatagtgcgatgcgaatgattgatattctaattgtttttacctcaacttttaactcgcactcatcatttgcaagtacaaatccctaggtagtctaaaagactgaccaaacaaaccataccgacagatacctgtaacttctgcgtgtaaggtattcattgttttattcgcactttcttgaaataaaggatgatcttcatataatatggttactctaacagattaaatagagtgaaaaggattaaggtattcattgtttaataccaactttttcgtgaactaaatatggttttatataagaatccaggcttgattttgaataatgcaaagtcattgtgttaccaaccggataaaaattcacatacaatgcatgtttgttgataaaaataaaataaaataaatcacaaatcacacattaatatgaaattaaaacttaaaagacaatgagaatatgcgtatataagtattaactgcatatctagatttcttttgggagttatactttattggaaagaatttgatgtgatttgcttgaaataatatatcgggccacatgttgccttgaattgagaggctagttttttcttccttggacattatacgaggcacttggtttttagggttcagacaactgaatcttttacactcgaggaaaatattggtgtcacgtcgaatgtcttttctatctcccaatcacaaacattgatgtaatttctatgcaacaaccacatttaaataacgacaatgttattttctttcgtatgaagtttctaaaggaattaataatatttcgtgggaaaaagaaaagtagtttctaaagtggaggctaaaaccacaatcaataagataatgcaccaaaggttatatatgttccacatatgtgtgtttgtttatttttcttttgggacctcaactgctttaagatgctcgttggatttggtattattatactatctaaagttgttaagtatttggagaaaaattatgcaactgatgggggtagtttaaatgaatattagtgatggctatagtgctgattgctgaaggattggtcttgacgcgaatcccgagaaaactgatgaacaaatatgctcaacagaaacataagagcaactagaaatagaggaagatgcaattgacaagttcatattcttctatgcaattgtcaattgtaatttacagcagaaactatttgtaaatagacccccaaaaatatttagttttatgataaatgccctcaaatttcaaaattgtttataataacccaatttgtttttgttactttgacccccaaattttcaggcaggttctgtctctagtagctcaacacgtttatatattagatccattttttctttttggcttatatatacaaagtcaacttagccagcctatgcatcagcccaaattgcttgttacgtataactcaagaaatatcgtaaagcaagtaatgcaacttctagtaattaataacttttatatattattatgcttaactcaataagtttattcattgttgataacttcctcaaaattgtaaaatccttacaaaattcaatgttattatatttttaataaatcaatgagattgctcaaagttgataaaaatgactcaatctctttcagagtgaccagttttttttcaatattgtggaaggattcttcatgtttatggatcaatttattaatggaggccgtcggaaggatgttatactgttcttggagaaaaaggccaaactggttttttttttagtgagaaaatggtgtttaagcaaagttgattaaacaataattttcacttaattatataaatgtgtaggtatatgaagcaaatacattgaacctaatgaaagacaaaaaaaaactccttttttataatccgccggtcttatctttgatcacatgcttatcaaatttaggcgcttgtcttttcccatccatgtctacaccttgttattttattgacaaggttatgcattgtccatatctaagtgtatgcataatgcatacatgataaatatatttgttcagtcagttcatatatatagtcttgtactaaatataaaacatactgtagcatgttcccatttgtctaaactagattacaagattttcttaagaaaaatgttacattaagatcggtaactatgttgtcgtattataaaactacaattattgaacagtgccggccttgaacacaagcaagccatgtattttatttttgcttatatatacgtgagataatttcttacaaagcagtaaacaattaaaggaaaaaaagaggcgagaatttaaaaaacaaaaacggcgaattcattgttgtaaaagattattgtagttgccgacaaaagagaaaaagaaaacatcattactttaacaatataacaaagaaggaagaaaacagaataaaattgggtcatacgaaattgttagacgcggaaatagttgagattatgaaagaatggcatgttcatcaataatgaaattaggcaatctaaggactttgatcatttgtttcgcattgagctaatattaatcttctacgtttcctattttcattatacatgcgaatgttccaacaattctatttgaaaattgttaatgataagtgtgaaaactcctgcatacactgcaacgagacaacaaaggttgtctctggcattattcttattccttctcactccccatgttcttcaatatttgtcttttcatatagaaattatttaacattctaaacaaataaattattaaaaattggttacacaatcagtatagactatagaatttaaactaaaattttatgaaactctttacttccaaaattatgtctgtagctggcaatattagttttttatagttgagatttttcttttttttttttggaatgacgaaacccatgtggcgttcatttttgtaagttagaagacaaggttagtttatacaactaataatgaattcattattgtacaagtcaaaatatttgtatattcagtttcttgggcagtgcataaggaaatctaggagcgtctcgtggtttgatagaatacttataaaaatatacgttactcttactatacaaactatttttattccattatccatttttttaaataataatatagttttgttcatccttggattcacgtagagccaatgattgtcgccatcgtgcaacctccggtgatcaagtgttttgtacggtaggacccattcttttttatcttattcgggccatccatgcggatacataactttcaacaaacgaaaatagccaatacataacataatttagtaacatattatcactttttcatgtagtcactagaaatattaatagttcaaatgtttcgatttgaagaatttgatatttcaactgacatttcaagtataatggtgcgttaaccaggcaatttgatctaggttcctatatatgtcggtaaaatacacaataacgaaaatacggtactcgatcttctttttgcttgcaagtgttgtattgttgaaattcttgtggatatatcttaggccttgaatgttttgtagattttgtaagagtttttggattttgtttttcaaaaacttattttcataccaatcaagatgttaaaattttggtttccttacaatttagaaaagctattttgttgtagttttccattcatgattttagttttttagttttcctaaagtttagggaatctagtttttactccatcaacgttatttttctcgaaaactaaaaactaatttttagagtttttaaaacaaaaatatattaacaaaaatctaaaactaaaatctaaaatgtagaaactaaaatctaaatccaaaaactgaatcgaaaatcagcaaccattcagggcctgaatctaaaatcagcatccattcagggccttagtgtgtcagtaaaatgtatttattgataagtgtcatgaactctgccaaaagcgattaagtttaaagttgatataaaaaaaacatttatataaaaatgtgattgttggatgaaaatttatttgttgatatttataaattgccggattgcttaaaggatgaatccctttacgggttgtttattttcaaccagtatgatttgaaaatgtttctaaactcagacctatattacagctagatacttttctagtatacataaatattcgatctaaaagtaaatactaaatacttacctttgataaattttagcaataataataaggcattaaaaacgcgtaatttaagcgcattattgtaactgatatggtgtgttactcattaatacttttaaccatacgaagcaagtattaatttcaaagtagtgtgacaaacaaaaaaaggtaatagtctctactctctaataataccaaaaataacgacgatgtgctgactcacaattacggactttagcaagtcacccttttactatagttccaactgatatacatgagaaacgtgtacgtatttattttatcagtaatttacctgttttatttatttgtctattttctggttaataaaaaaaaaatccagcctccaaattatatatttaggttgaaataacactagattccacagcactagattatttttgagtaatttatttttagattggttcattagaagctggattttccaatagaatttaaacactttgatatatttttggaaacattaaccaaaacatttaatacaatttaagaaactttatacacatagttataaatttaaagtaaagttcataattataaattactataaacaaaataataaatgtaataagtcataacatgcatgttgtgtataaatgtcatgcatgatcggttaaaaaatggtaaaacatggaaataacgaattattttaaggaagagacaaagtccctgcttaagtgggagaggttttaggaaagatagctcagtgctgctagggagagagaaaggacaaatatggcatcttaccaagttttcgagtcaaacaaaattaatcattttctattatcatctttatactaattgtttttaaaaaaaattatgacatgacatgaacgacattgctccctcttgtcctctcttgctatgccttcttcttctacactataagaacacccacaacattccccctgcaactccctctctctctattactctctttatctctctaagaaaccagagaaaaaagacaaactatctctctttctctctgttcctctctttatctctctaagaaaccagagaagaaaagacaaaatctctcttatctctttctctctaagaaacaagaagagaagagaccaaacaaatggaagagttgggttctatttggttttaccaagaggttagttttccttaataatatgaattttaaaggccattttgtgtaattgttctattaaccaaatcaacattttagcatgatgttcaattttttgcatttttatatggatgatcaattctagagtcttgtccttcagaatgattgtgtgtgtgtgattggaattctaatcactttggtttactgagtaataatctatctttcttttttcttcccaacattttacttttagttaactccgacattataaaactctaagatctatgaaaatctatcagaacaatccatttcacctacataaaatgtgacttcttgtacttttctgacccttttaacacaaaaagactattttctttttttgtctttttatttaattattttctagccctgacgtttatatataataataataattaatatgtttggtttacatttagtaacgttttgagtgaattcttgaccccatgaacccaaggttgttatcacacatgattagtaaaaccaatgtattttttattattatgtttccttttcactatactttttttctagatgttgatgtcttcaatgattcagccaatctttttttcttcattttaatatcaattaatttctgacttttaaccctttttgatattattacagagtatggatgaattaagacaaaagcttcaatatagttcctttgaactcgaagccgtgaaagcaaaagctaatgaagaaacaaaacttcaccaagaagaagtgaagaatcttcttcatcttctcaaacttgctcgtcaagaaagagacgaagctaaagatcaattacaaaaacttctcacaatcaaaacaaattcaagcataaccgagtcaaactctcacggttcttcaccggttgactcgttcttcgaaccggtctcatcctcggaattctccaatttcaacatggtacctgaaccgattaaccaagtcaaattcaagaaccgacaacaactcgttaaccggaacttgaagaagattgatcctgtggatgctctaatggatgagatcataaaaggtaaagctttaccggagaaagggaagcttcttcaaactgtgatggaatctggaccgttgcttcaaacacttcttgttgctggtccacttccacggtggcgtaatcctcccccgcttcaacagagctttagagtccctccgatctctaactcttacggttgtttaccggcgacgacaacgacttcaatgctgaattttagaggttgctctgttcctagaattgctaccggaattgaagttgcaactaaacgacaacgatttcattagtgtttttgttgttacaattatttttcttttattgctctgttttttttttggttatttacttagttatttggaattatattattgtaaagatttaaaaatcgtttttggagggtttaagagtttgtgtgtatattggagtataaacgatttgagattctggagtttaggtattcatgaattatacttatatcatcattgatcctgattccatatagtataccatgttcgattaagtagctaatttttggataatttgatgacataaaatgagttctagaccttaatttatgtggttatgcttaaataaaatatttctaagttttctcataattatgttttaaattgtaacatttaaacgcagaaacaaacaaacaatgaagacctaaaccaaacaagaatttctgatggaaatttgagttgttttcatcaacttttattaaaactatagagataaaatacatgtatttttggcctggagatcactggtgtgcctaactctcacagttgtagagtataaagatcaaagaccctaaagtagagacaaatcaagacagaggacttggtcttgtttctaaaaaaatattcaattaaagacaatacagttttatgggttggattgtgaccagtgtttgtggtggctttcggtcatgttcttgtacaaagttaggcgcaaaacatgttctgtttccttagttgcaactgctatgaacggccatcaacttcaactagtttcaaagaagttgcattgttgtgtcctcaaatcactgttacataagttgaaaaattaaaattgtttggcttttgaagatggagaaaataaggttgttccttgaagttttggtcatttcacagaacttatcgatgttatcaaaatgaccatcatctttttctccttagagaaaaaaaggattaattaaaactgagttttgggctttgtggagaactagactggactccactacagtagtcacaaaaactcaagtgggctttgtaagcttattacaaaaacaaatttccatcacaacgcaaactaatatatacattttaaaaaaaattattaaaaaataaaaagtgttacatgtaagtgaacatctttagggcctgaatgtggagcaagtttactatctaaattatttatttatttattaaataattgtttttttttgtcgacttatttattaaaatattttaaaaatggctctcttgattagaatatataatagggttcttagccgttgcaccattcttgacaaaaaaaaaaaaaaaaaaagccctcgcaccactagccctcccttacgaacagtttgattatgattattaaaacatcatttattatttaataaaacaatctatagaatataaatcgtcaaaactaagaaaaaatacttttacattagaagttgaaacattatccaatttaaaacaatttttttccttgaaacggaaggagtaaaacaactaaaacatcattaaatagaacgagtagtattcccaaatggataattgttgtagattcttgggaagaaataattcttcaaacatatataaaaaaaaaactcagtcatttactcatttgcaattccgtaaccgacgttaataatttctaaggataaataagaattaaattagtaaatataataatatccatacatagatgattataatccgaattcaaatattttttcctacattcccgattttgtttttctcttaatctttcctctttgcattatccattgatgatagaatataaacagatactattttataatttacatacttgtcgatcaatctaataaataaaaaaataattatttccttcaaaccttaaaggcttatacggttataccacctctgcctcgtataattttgtttcctcctcaacaaacaaaattaattactaagcaaatgataatatcatttgtactcaagatcgtcaataatataaatactatttctatacaagtaaggaaattggtttaatataataggagttttattaaatttaactcatatctatgatgttatgtcttaatatataagttgtatacatgatttattaatatgattttatctattatggagttataaatgaaatgatttagtaatacgtaatattgaaatagatacttgttgaagaaaatatgaattagttaattaaggtattatccataatttatccatattggccatcgtaattatccataaattggtccaagtaattatccaagtcaaagatacgtttccgaaaatctctcattaaataaccggatatgaattctcaatactataaatacgtgctctctcttcctattcgatatttttaacaaactttctcaaatattttcttacttttgatactctcataatcgtttagatcaagtgtttaacaatggaattggatctatcaccaaggctcccgaaaaaggtgtacggaggagacggtggttcgtactttgcatggtgccctgaagagttgccaatgctccgagatggtaacattggagcctctaagctcgctcttgagaagtatggcttggctcttcctcgctactctgactcccccaaggtcgcttatgttcttcaaggttcgtgctttacaatcttccttttgatcacgtcactctctttttaatgttttaaccaaattttttctagatcatgagttttgtttgttctctgtccataaaatatttttgttcagatctgatcaatcataaatcagttgcttatatatatatatatatatatatatatatatatatatatatttttgtatctacgatgtgttagttgtttttttttttgcttgcattaagccgcgatttggaaaacaacaattatatgatttggtaattatagtatactgtaaataacgtaagagtacccacaatctaggaaaattagtttattacgatccaaaataatttaattagggttaatatttcatatattgattagtcctttttgtgaaatatgatatgatttgtagattattatattgtgatttagccaataaatatagagttaaatgatccataaaattttcttgttaccatttttaggagctggaacagctggaatcgtgctccctgagaaggaggagaaagtgatagcaatcaagaaaggagactccatagctttaccttttggtgtagtgacatggtggttcaacaatgaggacactgagctagtcgttctcttccttggtgagactcacaagggtcacaaagctggacagttcaccgacttttacctaaccggatccaatggaatcttcaccggtttctctactgagtttgttggcagagcttgggatctcgatgagaccaccgtgaagaagcttgtcggatctcagacaggtaacggtatcgtgaaggttgatgcgagcttgaagatgcctgaaccaaagaaaggtgaccgaaaagggtttgttttgaactgtttggaggctcctcttgatgttgacattaaggatggaggaagagttgttgtgttgaacacaaagaatcttcctttggttggtgaagttggatttggagctgatcttgtgagaatcgatggacactctatgtgttctcctggattctcttgtgactcggctcttcaagttacttacattgttggtggaagtggtcgtgttcagattgttggtgctgatgggaagagagttcttgagactcatgtgaaagctggtgttttgttcattgttcctaggttctttgttgtctccaagattgctgattctgatggcttgtcttggttctccattgtgaccactcctgagtaagattttattcatctttttcgattgattaaagaacattttggttgtttttacttacatatttttatgggtttttggcagtccaatattcactcatttggccgggaggacttcggtgtggaaggctttgtcgccggaggttttgcaggcagcgttcaaggtggatcccgaggttgagaaggctttccgatctaagaggacctctgatgccattttcttctctccttccaactagataatgaaagaagaagaagagttatggtgtagttgttttatggtttaagcaagtattatgttttttttttcctttggtgtttttggtttgggttttatggaccggtgttttcttctcttttgttatgtgtgcttcaaaataaataagaaatgaaaaaaatatttcttctaaatttattgagaatccatacgattaaaacaaatatttctcttacttctcataagtttataaaatcaagttaaaatctactaattaaataattataccaagtctaatataaaatttacttgcgcatattttattacagaaaacaatatacaaacagattattcaatatattgaaattcttgttaaattcatttttactgaaaattaagttcaactaaaataattttattatctattaaatcataattttaatatttaaatttaaaatttcaaacgtaattaaatccgcgaaatatgcaagtattatgaagttgtttgataaaaagcaaaaaaatgtaatttatttctaaattaatagaagtagtttagtcaaatctaagctataaacacggaacacgtaacagtcagtcgttaatcttttctatccactttaaaatttttataagacaataaatttaattcacacaggattcggttacggtttggttgattggttttcggtgaaagaaatttgtctaaaccaggactcggtatagtggaaatgtaagaaccggaaaatttactttactcttctctcactcacaatgctttgccagattccacaattcaatgccgtcgtctgctctaaagtttgtggctttcatcacgaatttaaccgatcaatggaggtgggattgtgtaagtcttgggtattataatcaaaggacttggtttggtaatggagattggagaaggtgttcacaagacgttcgatgaaatgcgtgagagaggaaaaatgcaaccaacgatcgtgatttacaattagccttattggatttttatgccgagacgataatctctgtcaatcagcgacctttttcatggtaagatcagatcattacttattatgcattctcgtttagtttatattagcagatagatggaaaagctttaagctttgggttatttaacattacagcttagcaattttgaggaactaatattcaaatattgtggagaagttatgattttttctcttcttttatatgattcttctccaaaaccaaaccactagataatgtgaaaaaagtgaccacctgctccatttcatcaactccatcttcttgtattaactatctcatttcatgtatgtatatatactctttgagaatttgattctatcatcacaatcatttacttcaaacaacaatctttgcttctctctgagtgatcatctttcttgttcaatggctggtcaaaagatactttctttactggttatagctcttgttgttacttttgcagctgcggctcggcttcttgatgaagaaaatgcattctcagctaccacaaccacccttggctcaggttcaggttccaccggaattggttttggtgcaggaacagggtcaagtggttcaggttccacgggattcggttttggtgcaggatcagggtcatctggttcaggttctactggaagcggtctcggtgcaggtacagggtcaataccatcaagtggttcaggtcctggtcttctaccaactgccagttctgttcctggttctttagcgggtggtggttcaggttccttgcctaccactggttcagccactggtgcaggtgcaggtaccggttcagctcttggaggtggtccaggtgctggctcagctcttggtggtggtgcgggtgccggtccagctcttggtggtggtgcgggtgccggtccagctcttggtggtggtgcaggtgctggttcagctcttggtggtggtggtgcaggtgctggtccagctcttggtggtggtggtgcaggtgctggtccagctcttggtggtggtgttgcaggttctggttcagctcttggtggtggtgcaagtgctggtcctgacaatacgttggtattttttatgcatgatatactcggtggttcaaatcccactgccagagccgtaactggagtcgtcgcaaatccggctttaagcgggcaacttccatttgctaaacccaacggcgcaaaccttcctgtaagcaacggagttccgtcaaacaacaacaacaatgggattgtcaacaacaacaatgtccctttcctcgttggactcggcggaaccacagctaacattctccagaacaacaataacggaaacaacattttaaatggtttccctgttgctagtggcggtcagctcccgagcggttctgctcttcagatgctaatgttcgggacaatgacagtaatcgatgatgaactaactgaaggccatgagctcggatctggcttactcgggaaagcgcagggatattatgtggcgagtgcaattgacggaactagccagacaatggctttcaccgcgatgtttgaaagcggcggttatgaagatagtataagcttctttggggttctcagaacagcggtatcagaatcgcatataggagtaatgggaggtaccggaaagtatgtgaatgcgaggggattcgcgattctgaagacgtttacaggatctagcgggacgcagcagaatcagccgcatcagttcactgatgggcttgagactgttgttgagtgtaccgtttatctttcttactagttttatttttcttcttttgttggggtttgggaatgtttggtgtgtatgttatgtgtgtcatttgtaatctaaatatgaaatttgtgtaagaaaattgtatgtacttttttttcttttcttgaaattactgatttgtttggagcaaatatatttgaaatataccgatacgtttatctcaaagtcattgtttcagtaattacgtaaactgttcatcgccattctaaaatctaaactataatacaattgaacaatggaatgataaaagatcgaaaaaatgtcaaatggatatcacttgttatgactcaaatgaagcaaaagcatgtcatgtttaaaaagtgacataatgattgatgttctatcattagttgccgtcattggagatttgcttggtgggaaacgtgaaagttgtatatgacataatgatgttcagttgcaaatttgcatggtggaaggtggaaactgtgaaagaagttttgcagattaaaattttctacaataaaaagagacgtagataaaatgatattaaaattcttatgagttagtataattttggatattgttaacgagttatgtagttactaattcatcattaattcatctcattttaggttgaaaatataatatgtgacaaatatttaacaccaacataatatatttagacttaatgtttttgctatgcatttgtataatttgaattattattattagcattactatttttttttttaatgcaaaaacgtatatacaaataggaatacttggagcaagatcttgaatccggatagctttaagttttaattatctgcaggttttaaagtcttcgaccaatggccaataagaaccaaaactagtatgccaataaacacattactagtatacaaaaatataaattaatatttccaaaggtatgtccatctatgttaattatgtttactgttttattaaattaacttatctaaactttaacccaaaaaaaaaatttacttatctaaaaaagtattgatataaatatgaacttactagttaaccaaaaaaataatgaatttagtatacaagtttcatccgacttggtttcctatgctttatctttaagattttttatgtgttgaaaaatcagcctaccaaatatatccagaaaatcgtataatatattaatttctcataactttgggcttttgtatctttccggccgcccaaatagtttttagtgtaaagtattccagaaacaaagacaaaaataaactaatgaaaatccaaatttagctccttcttactatcaatgacacttcttaattattatgtcagaaaaaataaaattcactgacacgaaatactaaatatccttaggtttgcaaattggagtaatttgttatcaaggtttctgtattattacgttggtcttaaatttaatattgcactgattataaactcatcatatgtgaccaattaatcccatgccctatagcaatatcataaaagttagctttaatcgaccacaaaaatgtcacgtttgaagtatcactaagcaagctctatgactaactaagacatgtcatttcatataatgtcgttaagtttagagaacatcagaaccaaatttgacccaccgtgaatatgattgaaagaagcacatgtccctacgacactaaaagaaacgataactttgatcaaaaaaattgtatttaagtgttttacttttcactgtttatgaaattataaaatatcaacatagcacgccggacaattcaatggtcctcatgttaaacatcctttttcctcattttctccgatccccacacacatatgcaaggcactgtctatatatatgtttaaatatcgactagtattatttgagtacatttttaaaaaatgacttcaaaatattcaatattacaatatatacaattacaactaatttatttaaagaagaaaacaaaacgattaatcaattgaaaaagtgtgtgttacatcaattgtactcaattacttttatgatacaattgtatcattttttcaatcgatggatattaaggtcagttactataatcgatgcaaatatttatttcaattgatgaaaaatatttgtagaatcccttttagagttacttatataaatgatgtaaaacaaaatcacattaattgaaactgagacaaatatacaaaataagcgccacaaaacatcattttgtataaaattatggattaaagtgtattattattaaactattatccatagaacaatatatattttttactatcaaaacaaccacccacaaacatgacattcaaaatgtataatttcctttttatatagaagcaaaatattattttttttgtcaaacagaagcataatattctttaaatgtattttcaactctacaaaaatatttttacaaaaatatcaccggaatagaaattaaaaacaaagattctttaatcaatatcggtctatattaatcatttttataattggattaatattttcttaattgttagcactatcagatgagttctaactgatttttgcatgaaagactcggttcatgtgcagatcacgctttgcttattttgtaattcacttcactgattttgtaaaaatgaatgatggacaatgaaacttaggtaaaaattatgtgccatataacacatgttgtataaagagaccattccactttcaaattcaagaaaaaaagaaatatataataagaaagataaggaaatggtcatttattcaaaaatctcattccatacaaaaaatccaaggaatgctacagattaatctgtagaagaatatatgcaattgtttatagaagaacccggaaaaaatctaggtatggtagaaaactataaattattataaaaagaaaaagaagaaaagggagaaaagacgttgcgataagaatccgttgaaaattgtactattaactcgtatgttctgtcttgtaacttttataataaagtgcattctcataagcgcgcctctggtaatccttaacgcttttatttttactaaacactaaaatcttatcctgatatttaatatcatatgaatgattattttgacgaaaagctctcgcaaaaactaaataaatggagggattcaactgaaaagttgaaatttttttgcaggttatgatctaggactacaaataaagtatatcttgtaatttttgctgtaacacttccaaattttaaaaatatgatggtacatgcctaaaaatttaaaagaattgatttgaaaaactatatcacaaaagtgcagttatgtatgttatatgaaatttagttgtcggaaagagaaaaacaaaaccacctgctacaaacatgtgtgtatatgtatgttaaactacaccacattaatgtcgcattgatacgaatcacaacatgacatatgtctaatgaccatagcctttgaactaataacaagaaaacagattaagatttgaggagtgaataattaggaatgtgaggaaatggaggagaagaagaggaaggccaaagctgagcgaatttgacctttgagatgctttctactagtccgacgggtgttatctttccgaccaccgtcaccttctttgtcgctaaatcaatagtgtatgacgtcacccctgtcccataaacaaagtcgtaaatttcattaacaattatactttatcctcaaattagtcattcgatattcttcatttaataaggaaaaagttgttgcttagagggcatccgataatctggaaaagtcaaaacactaaacttcaaattaggctcctaaccaatatatatgcgttttctaaatatttttcctttgataaaattagacaatatttaacatatggtcgtctattcgctgaatgtttcatttgaattgtatattaaatgttaaggttaggtacatgaataagatacttaattctgtagaatgaatttagaagatattcttagtaccttccattttggagatatgctttctaacctttccttcacatcccttgcaatggattgataccctcaaaacaacaacctgccaaaaacaataattaattaaataaatataggtagaatgaaataacagataattttattttattcggcaaaaataacttataattgaataacaacgaaaaaagaaaccatttgttatatttatgtatgtttgtattattttcagatatatacaattaaataggtaccacatatccactatacgaaagatgtatatcatgtgagaaaaaaaaaattacttgatcaaatcaaatcgtaaaatgcaatttaaaccataattaccttggaaccaataagatataatggtttctactagtgaattgtctttctatcatctttagtctcaaactctatggaataatgcatgttgttaagaaaacacaataaatactttggttaaagaagaataatcaaacctggtcatcagtggatggagccggcgatgaaacattggtcacagaagaagagaaagatgatgaagaagacgaagaagatgatgaggctgaagaagttacgttgcggtcacggtaaagaatcaaatctttagaacgatccgatgataaccagaggtccttatcatcacctttcaaagacttatgatcttttaaaagatacctggacgatgagcttagcagagaactccttgatctcctcaagtcacttacgtcagcagagcttttccggcggatttgaacatcgctaccgcgagccgaagcgattttcggacgaaacccgcttggagattcaaaggagtttctacagctcaagtgacgaggaatagggattaaaggcatctcggaagagaagcaagggacagttttatccttcttcttactagggttttggctccggaggtggctttggaaagatctgcgacctccggtaacatttccgtcgtggtgaagtgtactatgtcgtacggcggttgatgccggagaagagcagaaaatatcactaaatctcattctctctttttctctcttttctttctatctttatctctttctcactataagtctataacactcactttctgtctgttgattttaagggaaagttggtcgtgtgattatgcgactaattgctactaatacgagttttaaagaggaaggtaacgaatcatttattttaaaattgttttgttaaggtaaagtagatattattattatagaatgggtcctatctcatgagaaggagtgtgtgaaaagcatttcttggatcgatcttgaatctgcaccttctaaattgctattttactttatttgattttttattgtcccaaaatttgatgtattatattaaataagaaaaagaaacccaacaaagttactataccaaatgatataattaaaaagtttaaaataatggagggtttacaagaaaaagtgatgcatagtgtaaaaactacgtccattttttgtcgttaaaatttttcattataatcagattcagagttttaacaaaaaatattctcttctttgtcgatttttgctctcttcaaatgagaacatgcaaaaaaattaaataagaagagcaatccctagggttagtgagcctaagtcaaaaatcaaatacttttaataaaggtgactaatcaacacatgcatatgcagtaagcagtctgatcaatattaatcaaaataaatatataatggaaaaagaaagaagaagaaaaagaatggtattgtacatcgaattcgtatatacccactaggtactagtgtctcaaggtggggacaatcttttgttgaaaaagcttggattcaacttttcctacaatgattactatcactaacttactaacttcgaacctagccactaatctcataaccaaaatataattactgacttaataaatgttcaaaacaggttctggaatttgggtggactctcagtccctcctgactcgttttaaacaatatactaatgggccaaatttacgagccttctttgtagattaatatcaacccaatgggccatcagtttctaatcatgaatataaacttttaacagaacgtagaaattagaaactagagaaaagctattattcgagatttctaaatagccgcctttaagaatatatatatatatatatatcaaagtcaaacacagaatacgagtaaaccaatggagttcttaccattcttcttttcgttgtaaatatgcatggacctatcttgaatcaaatacaaaatgaataaattattgtgatgaatactagaccaaattacaatgaataaattattttttacatgatccatgagtgttatactcttgagtaggttaatcgaacgaataagtgtgatctatattagagcatctagaaaataaggtaataataaaagataagtaatcatcctaatcacaattaacaaaactaatcatttcattagtataaacttttacaggaaattgaacaaatcaatctttaaaatgttgaaattaattatatagagaaataatgtttggattagaatcatcatatctatatatgtgtatataatgtgtaatttgtttaattttcattcttttgacaaaaacatcttgtaaatagaaatcatataatattaaatttagtaagtagaatcctcaaagcaaggaattgataactaattaaagaaaaacccattcctcaaaagcagatttatggacggccaataaagcgaaagcaagtccgtgtaattaacactaaccattgttcacatttaaaaaaatgttgaagagtcactcttgagaacgtagttttagtaagaaagacaatatatgtgattattataacaataacaacaatataatataaatctccattttaatatccgctgcgtcatagttcctagagactattgtttgttatttgattagttgattacatattgattccttcattaatgatttagtggaaaagcttaactaacaaagtagaaatgaaagtaaagttgcctcgtcggagagtcgttttcctaatggaaaggcatcccactacaaatgtgatttttctttgttttattttatagtcagttcttttgtttttcccgcctctattttctcctttgtatcctagtttataataacatctttatggtaatgcgtctcacaatatttttgtttgtcattgtggatgtgacatttatgattttgtctatattacttttgtttgatcttaacttaagcctgacgatttgacaaatgcaactgtgcgtttttggtaatgatataccaaatagcaaaaaaaaaaattgacaaaaataagccaatttgattatggtatctatgtgaattaagacggcttaaacattcagaaaatcgtagttttgatagagtaaaagttttcaaactcagattagttgttgtagccaatctaaagacattaaattataaatacactaaaacaagtaagtaataatggttttatatttttacgttttcctttcagtgatggttataattaagagtttgatagtctcagaaaacttatttaaaacttcatagcttttcataattcttacaagacaggtcttagtcttactagaccattttgggagaaggtagaaaaatacgattttgttctaattgaggataaaacaaaatgtgatacgttcggtgtggtttttcaaagtgtaaggatataaatgaagaaagagacaaagaaatgttgattcattacattgacattttaatttgtaaccattaatatacgattacgtgaagtaatttaattaacgcggtattttaaaccagtagtgtactttttgtccagtagctgtaattagtaaatgataatcaaatttcaatattggaaattaatgggaaaaatgacatcctacgagaaatcagtcgtattacagtaaattgttagtccatagatgtggacgtgtgatacataattgtaattgattttctttttagcagaaatagaaactgctccaattgtgagaaaaaaaaaacacaattatacaaggtattatagtatcatcaagtaattaatgttgtttattcaggcaaggtttggaattacttaaacaaacaagctttttgcatttcaatcaaacttagtcatcgacgcgtctagtgtcatggtttaggtgactttagaagaaacgtaagtatatatatttttcaacaagatatgaccaaataaatacacgaatggtcttagtttcatttgtttaatcacatatttgaagtaaaataatattggccttttccctcgtttgcatgggaaatgagtcaaataactcaccaaatggattcgttttccgtgaacttactctaatatgttgaaaatcaacaacttccttcaaaattaagccatcgaatgtataatttctatataaaataatactgcatacatgtattaaagaatttgattaaatactcgaaaatagtttggatattagagaacttagtatttttgctcgacaaaaaattcgtatgcaagaattggtactttgactttacagtctttacatataaatttacaaataattagttttaaatgtcctctgcagatatgtgtaaacggaaacaacaaagtatgtaacaagaaattatgttataccaccgtccgtgtgatttgtctacataaaaaacctagtataacgtaattaatgtaaatgctatggtcggtttacatttccaaaataaaaaaagaattgtgatgattattgttggagatagctcttgttcttttatgtattaatcagttaggtcatgatatgtaggtatccagtaacattttattgatcgattttctaatctaaaaggcattcaaaataacttgttattgggttctataccatttaatgtaaaacaactatgtacacgacatatacatttctcgagatggtttgtttttccccaacaaccaatctactacaatcttcaagagcaaagtctgataattttttaaaaataatctaaaattttgaatgaatttggagtagtaagtaacactttcttgtgacccaaacatgtaggaaaccaagtagtggttcaatatattatatacaccatttgatcttattagtatgattaacaatatttcgttgttgttttgagactatctatttattcttcatatagtagatgaggtctagtcctaaaactcgtctcgtctaacacctatataaaataggtttaacaaacgcaataaatactattcaacaaattcacttttgtccaattcttctatctattccattgcatgggcacaacactattactacatcaatactacattaattgatgagtttaaaaagtatatgtaaacgcgaaacatgtcattgtcacacgtttttgttattctataaagaatcatatcataaaaacagagcataaccactataaatactgtttccatacaaaatcatcatgtacacataaaaaaatcaccaaacacaaaaatggtactcttcactttatcaacaacttcttcttcttcttctaagctaaaacaacattcacaccaaagcttctcagagtctctaatggaacacactatcgaagacgctgaatccatcatccatcgatggatttcaccagaacacgtccactcttcttccttctgcttcatctcatcgctattttcaaccgaaaaccgcgaagaagcgaaacgattcatcgacgctgttaccaccttacactccggtatgataagactaatctcagtgaatccaacgtcaatgaaactcgttaaagcagagaatctaatgcgtatctcaatgactcatctctccaaagagttttaccgcattctcaaatcgaaccgacgttatctcgaccccgaatccgtctctatccgttcttcaaaagcttccgattccgactccgattccgattccaacaccatggatgatctaaagatgatcgcggattgtatgatatcatctggctacagcaaagaatgctttaaaatctacaaaagaatccgtaaatcgatcattaacgaagcgttaaaccaactcggattcgagaatttaacgttttcgcagattcagaaacttgaatgggaagttatggagaagaagatacgtaaatggttaagaacaacaacaagagcagtgaatactctgttttccggtgaacaaatcctctccgatcatgtcttctcttcatcatcatcaacaattcgtgaatctgcatttgcagaaatcacatcacaaaccgctttagctttgttcactttcccggaaaaaatggcgaaatgtcgaaaatctccggagaagatcttcctcactctcgatgtttatcaaacgatcgttgatctattacctaagatcaacgaactctttagctctgattcaacctccaccgttagatcacaagtcgatttaacattagtgaatctcagagaaggtgtggtttcgatgatcgacgagttcgaatcttcgatttcgaaagaatcatcgaaatcgttaatctccggtggtggaattcatcaattgacaaggtatgtaatgaatttcatcgtcttcctcgctgattacagtgatacactctccgatatcatctcgaaaccgtcgttaccttcaccggaagaagaaaaagactccggagattcgtcaccggtgaaatcacgaatctcgaggttgattttgttcttactctgtaaaatcgacgccaagtctcgtctctataacgacgtagctctctcgtatctgtttttgattaataacgttaattacgttgttgttaaagtccgatcttcgaatttgaagacggttttgagtgaggattgggttaagaagcatgaagcgaaggtgaagaagtatgtggcgaagtttgaggagattgtttggggagagatgatgacgtcactttctgatgatgtgacgatgactgcggaggaagggattaagcggtttagtgatgggtttgaggaagcgtataagagacaaaccggttggattgtaccggattcgaaattgagagatgagattaaacggtctgttgggatgatgattataccgagatattccgggttttgtgaaaggaaccgggtcaggttattggagaatgtcggatttgaccctgaggatattgggaattatctttcggatttgtattttgggtctggtggatcagggagtggttcgtcagttcattcttcgggttcttctgtttaacacgtttgtgatgatttaatttatattgataagtaaataatattggtatttgatatcttgtcccaaaaatagaaagtaaatatattgatgtaattattttggaagctatggtatttttattagtctttatgaatagttttgtgattgtaaaggaacaaaaggaaactaaagtttaaacttactacatacttctgttttaggaaaaaaaaaattagtgataaaatacatacgaattagaaacttagaggacactggtcaatttatttatcactatcacaattcgatacattgtccaaatatacgaattagaaactttggcctttcaggttgaacattgtccattttgttaagtttgatttcggttaaatccaattagagtcaataaaccagtttactggttaagagttggctcttgtacgaagacacttttgcatttctaggtcgaatgaattaatttcttaactctcacggcttgtcttcctcaatagtcatcttgtagactgagattagccattgtattaacatgataagtaaagactaaagacttacgtctattcaaaaatatttagtgtattataacgataatctatgtaagaaagatgaattcaatcaattcagaaatctacataatatatatcttaacatttattttcaagatactataaacactaaatatacatgtagcatgaaattagacacaaattttcgaatcttaaaagcagctcaaaatatagttagcattttttttgggttcacaaatatatatttcatttatattaatctcaatcccatgcgtaggcaatttttagcgactatatatggcaaagtatttgtttgtatattttccacatttgcaaattaaacacaaatggctttcaggtttcctctcatggccttcctcgtattcgtctctctctatttaacttccggatattctctttcaacaatatatgatgtctcgaagtaagaacacctcatactcctatatttcacttgtttcattttggttgcaactaaatacatacatattgtattcttttctttttgtttagacatgaagatgaatcttatgttatggctacgagtgatcatggatcgcctatgaccgttgttgaagctgaagtaagaactccaaatcctcaagctctacttgatggctcaaaagtggttacgaatactgtagtttctaagagatcatcaagcaaaagtaaaaaaggttctcttaactaaagaaaattgctttggtttaatttacgttgataagagattctcttaagcttttagtatatactaaatttgatattaaaaaaaacttcaaaaaatttcaggttggaagaagaaacataagagcaagaaagtaggatcagtggatgttgaaatctgtgtcggaatcatcgtagcaattgtggttatcattattttgatttgtgttgtatactttttttgtctgagaccaagaacaaaaagggctcaaagtatatagtccacaatgtaacttgctacattctatatgtctttgtaactcaacttaattattacattctctatagattagttatttattaatgaaatgctagtaaactttatttaaacatctatagatcatcgaaaatttagactcccaaaacagaggatcgtgtcttaacacataatcgttaccatgagttggggagagctaaattgtttctcttctttttttgctaaaagttttttctcttcttatgtgcgtgatttgttttagtttttactaattaattatatattatggcttccgtgaattattgttctcgttatttttataattaatatacttctattgaattattgatcttgttatgaatcttgattttaaatagagtatcaaactccataatgaaattgttttaatgagtatcaatattgagtttgattatgaaattgattacaatggaactagtttaaagagtatcaatttcaataaatatatagatataatcatatgaaatttaaaagtatccaacacaacaagcatacactaccatattgaattagatatatatatttaattttcagaacaaaacaaaactaaaattcaaattgtctgttggtatttttgaagcctcggaccccaaagtatagtttttccaaacttgatactcttacaattagattctctaaatctagattgtttaaagatatactatgtcgaaataaataagaaattaagattttcatatataacgtttctccttttttcttaagtaattgtaagattaactctatttttacattctacatttagacatcactctcaagtctcgtaaatagactgacgtatccaaatccattgattttcgtcttttttataagtagaaaatctaaaattgttagactacaataaaatcaaatccactttttaaattttttataaagcaaatggaggataaccacatgctttaaggaactcgaatcaaagacctcaaacataaaaatagtcaaatcaaaaatcaaaacatacttcctttgaacctccaaaacaaaacaaaaatcaaactttaaacatcttttcttcacgttctatcataatttacaaaactaagaaaactaaaacacaacaacacaaaacaaaaacaaaatgatgctactatttaaaccgtctttaactctaggaagaaggataaaaccacgtccatgccaaagcttctctgagtctcttctaatggatagtattgaagcagctgaaactctcacacgtaaatggatttctccagatctctctagttcatcttcttgctccctctcctcgattttctccaccgataatcgcgtagaaggacgaagattcgtcgaagttatcaacagcttacaatacgcaattcaaggagtggtcttggtgaatcctgaatcaccaaagcttactagagcgcataatcttgtgacaatcgctatgaaacagttggaaaaagagttttaccggattttaaaatcgaatcgacggaatcttgatccggaatccgtatccgttcgatcttccccatctttcaatgcaagaaacaaagtgtctatttattcccaagttccaaaatctgaagaagctgatgttatgacggatttgaaaatgatcgctgattgtatgatatcttcgggttacgaaaacgaatgtatcaagatttacaagaagattagaggatcaatcatggttgaagcgttgagtaacttagggtttgagaatctaagttttggcaagattcaaaaattggattgggatagtatggagaagaacatcaagaaatggttagaagctacgaaagtcctaatcacaaacttgttcgagggagaaagaatccttagcgatcacgttttctcgccttcagtctctgtcgcggagtcttgtttcacggagatcacgttagatagtgctttaacactctttatcttccccgtgagtgtagctcgatgtaagaaaaccgtcgagaaaatcttccttactctcgacatttaccaaacgatatcgcagcttatgcctcaaatcgaagagatttttagttatgattcgactactgcggttcgactacaagctgctgattctctcaacaatctcggtgaagagattaattcaatggtggctgaattcgaagcttcgattacgaaagaatcttcgaaaaccccaatccgtggaggcagtgttcatcagctcacaaggtacttgaaaataatctaaaagggtgaaatcctctaatttgtgtaacgtttaagtttattgtattaaactgtggacttccaactcaaaactaattggcaatgaatagagagtcttatatcttatatataccacttaagaccctactcaactttcgatttgtaacaatatccctaatatatataatttaccataatcataacaggtacgtaatgaatttcatcgtttttctcgcggattaccacgaatgtctcgctggagttctcaccgaatcgacgttgccattaccggaagattactttgggaacaatgacgaagacaacaacgaaggagaaaccggatcttcttctactgtaaccacaagaattgcatggctaatcctcgtcttgctctgtaaaatcgacacgaaatctcgaatgtacaacgacatggctctttcatacctcttcctagccaacaatctgcattacgtgatctccaaggtacgtacatcgaatatgagagtcgtgcttggcgacgaatgggtaacgaatcacgaagggaaagttactcagtacctcgaaaaatacgagaaaattgcttggggagaagtgataacgtcacttttcgattccaacgaagaaatgctcgaagaacacgtggcgaaagagcggttgatgcggttcaacgaagggtttgaggaagcgtttcagaaacagagtgagtgggtcgtaccggattcgaaacttagagacgatttaaaagattccgtgacggagaagttaacaactgttacgacgacgttttatgaaaagtaccacgttgaaaattgggaggaagtcaaatttgcccctgaagatttggataattacctctctgaccttttcttaggtacgggacgatcttgtattatcgttccttcgcttaaacaatcggactcgggacgttcacttaaagattcagaatcaggacgttgaagttggagtggcatgtacgtaaatatatactttgaggatcttttgatgaaataatgatcgttggatcgatcattgtcggacacgtgttgaccggtgaagcctgtgattggttagcaagtgagagtgttttagtatgaatgtgatccaatatttgtatagcccacaaaacgaagcagcccagtttagaagatgtcatttatgataagcctaataaatttgtggctgtgtgacgatttatataggataacaatgatgtaaaatttattttgtatcaattaattaacaaagattacctcaaagtttcgaacggatcctattagaaagtaaataaagtttataaacaaatctgaatggttaaggaagcttgtcaaacgtatggaaaaatggccataaccttcaaaagatgatagtatttagtttaggacagctgaatgatttgttattagaaaatttagttaaagatgattttttttctttcttttatctttgtataaagtataaattaaattttcctttgtataatatctgctcttttttagactaaaatactcattaacttggttatcatacgagagagagggggaaacgaaaaaaaaaaaaaaaaaagatgatagagcaaaaaattgagttcaaaaaatctttgtgatacattaaaaaaaaaacaagttgtgccttttaaatattaaatgattaggtgaccaatggcaatctcataaatgaaagatgttttgggagctttttattcagatataggatattattatagtattgtcacaaaattatttaccaaatactgatggtgtcatataattcaccgaataattatggtaattaaaaagtttttttgggagcttttacttttataagacttttagtatagtactttaacaaaaacatataataaaaatttgcatgtaattagttgcgttgacttgtatatcaaccattggatacaaatagtgcatttgaaaattgaattcttatcgttaatacaactagtatcgaaagtgaatgaacaacgcacctgctaccagaacagattaagacaaacgtaggtactaaattacgtatctactaccagaataaatttaagtaacaaatgtttgattagtctatgagaccatgtctttccgtgaactacataattgataatatatttgtcaactttaattcatatgaaaagtcaagactagcaaatttggtgtcaaaatcttattacaacaatatactaaattatggttttaaaataataactatatatatagtctacttacacttaaggtcttattttttgtaagtttaagattgaatattattttttttttcttttatagatatttcactgactgtaactaaaatgtgttctaatttggatacattttccccaaaactgaaaaaaaaaaaaaaaaaacttgaatggaatcaaaatgaaaaaaaaactatgtaaaagcttacaacattgtgctagtttacataacgcaagttgaattttgtttataaaaaaatatatattctaaataataataaaattaaagccgacttacccccatccacactaaaagctgaaattttaattccatacaagtttttacattgccaagaagaaaaataaaattcggaaaaatattatatatttcaattcgggaaattttataaaatcaccaagtgtttttactacttctctattttataaataatctattttaggtgttgttagcgttgtggaaaagaatattttaattttaataaacttcaggattgttaaacccataaaaacaaattaggattaaaatgttttgacagaatttattttccagtttttctgtgtataataatttaacctagatatagtattttcgttttgaataattaaactggatataaagttcatgatcgttgtctcaaatttttgtaatcttccaaatttagcaatcatagaataatttaccttaacatataagaaaaagatctttaaaaagtaacaaatacttctgcgtagttgaaaatagttaaattcatataaaccattttttcatcttctagattaaatctcttctatcaaaaataaacattaatgacattcctacagtattccctgagccaaacataatgtctagctttttctgtatatatgaataattttacatgttatatacacatttcatgtctaatctataaaatgtgaccacatggaggatgttcgaccattattggaaaattttgaaattgttatgtttagaaaaatacagataggaattctctactacgactgtattcatttattgattgctatatataatcatatactgagatttttacgaaagggaaaaatcaaattgactcattatggactatggacgaattaaatgaacaaaactaaacaagtgagtagacttagtaaagcttcccacgtgcatgtgtacaaacaacttatagttaaattatggccaattaacttgacgatgtcataaccagaaacgcccaaaagaatggcaatttaatatattatttttgtgtttataaacgtaagatgatattttatcatttagctttcagaatagttattctcgaatacgatggtatatacaactatggtatttaaatacgataatatatatcgtaacaatctttaaaattgtttaaaattaacaactcctataattattatctatgattaagtatccaaaatgagaaagcatgtaaaatttgcaatatttaagattttctacaattaaagatttgtataaatatatatgattacgcatccaaaatgagaaaaagagttgaacttgcaacgttttcaagtcaattttagaatatataccaatgatatcataaaaaatcatccatatttctttattgcacagtgcagtttgcactcaaaaattcaattaattgttcccccttaatacatataactattagaatttgttttttaaaaactattagaattattgtttgatatgttttagatcaaaaaattagattaaatcataatgttatttgtataatttaaaaatactccctctgtttctatataattgtagtttaagcattttttttttccaaaataagtgttgtttttaactttctatgcaaataataaatatatttaatagtttctaaccaattatatgtaatcatatatttttttattggttgaattggttttaataaatgatgtttttatataaaagaggtagattaaatgaaatgtttataattttttaatatgtgtgtaaaaaccttaaattacaactaatatgaaacagatggagtatttttttgttgtcaatttcctttgaacttgctgaaaatattttgcaaaaaattaaggtaaaaacatgagtattttatttgacaattctcttttttggttaagaaaaatattaaaagttaaaacattttagatatcttattataagtgctggtctagttaatttttatataataagaagaggacatttaagtgctagtctagttagtttccctataattatatacttactatttttacataataagaagaagactttttacaattaagtgtgataaacgttgaccaagcagatacattgtagagtgtagtattagacattagtgagttgttatcaatctttgtcactatttattgtacgcactagtaatatagtactatgaatgtttatctattggaactataacggcgaagacatctttttgaatcaaacaattaatgaaaagaaaattggacgaagtctttctgcttgactattaatgtcgtctcctcatttataatctcagtctccgagtccgatctatcacggaagtcaaaataaacctcacttcagtagaagacttctaattacaaaatttgtttaaattaggatttcaagcagcctagttgactgcatttaagatagttcgtcgttatctatcaaacaaccaaattttcaataatctaaatatcatcttatccaaaccataatgtataaaagtcagaaaagaactgacgacttttaaaaaatttagaaaaaaagtttgaaaagtgtaaatgaaaatgtaaaacaaaattgattaataggttttttttctagataaagatgatttacatgttaacaagataggacagaactaaaccactctccaaaagtaatgtttatcttcgatgtaccaaataacttccacgattgtaaaaaactaatattccaaactcttgtaatatcgaatgattcattggcgaattgtaaagacaaataaaagtgttacaaacttatatgacaaagagaataatggtgacaaaaaaaggcaacacaaggtttaaaaaatatgctgtctttgcataagttttttcgattaagaaatgatcgaagagactcaagaattttttactagaccaaatcgaataagtgataatgtaatataaccagtgactgggaattgtttgacaaaaaaaaaaaaaaaaaaaaaaaaaaaaaaaaaaaaaaccagtgactgggaattcaaaaacttttaatctacaaaactacaaaacactaagctacgattaatattctaaatgtggcccttgaacttaaatttgttgtgtggcctagctaaaactattgctctactaaaggcgagtgccatataggcccagagccaccacaaaaaaccgtgtacaaatgatagtacggacgagtcgaatctttgaggaccaattttgttccatactaaagatgctaggacaaacgagtttcaagctaagtgacaaacatcaaacaagtaatcatgcataaagattagaattacaaaaaaaaagtatatacgaattacgaaacgatcataggtaaaaatatttaactaacgatcaaagctcatataaatccatagttaaccaatcttttaagattcacgggtattaaagcacgatctagacttgggtcaatatagcttaagtctattcagcttttattttctttgctaatcgaaatttaagaagcgcattaatcacttgatcaaaactggaattattcattgaaatgaaagatcaatattccagttaatcataactctgaaaagcttcacttttattgataactctaaatcgaaattataactttcatcaaaatttccaggtatgtgaataactaaatttccaggtatgagtagtgacattccgtgagaaaagaaaaataacataatgcttcgaatgaaatccaaacaaatgatgaaatctaaattcatcatatctctgtacggctacttccataatgaccattttcactgaacttcggataacaagaaaattggcgatgaaacggtctagaaaccgataaatatagaatcactatattttttcttcttcctaagtatttaatatatgttaaaactgtagaaaattattttggttcacttagtttaaatacttactattttaattaatatgtgaaaacatggcgtcaatgaaactaataaaggcatgcatgggacttataaattgctgagtacacgcacctagatagacaccaaaagtttttttataaaacgttcgcataaaaggtttgagacttgagaacattgtatgtctagtgtaatattgacttgagtaataaatttacaaatggttgaaaaatacaattaaattttaaaacaaaataagtctaataattatttgttgtaatactacaacttgttcgttttgtaattaatgtgatcaagctggatatttttcgtagtattttatttaaataatatttagtttggaagcaagctaataattttagaaatccctgtctaaccatttttttgttaagacatactatgcaacgagatttaatttccaagcaagccatgtgatattatattttccttactctacttcattcacatattaaatttgaatgactaatgacaggttatgataggtgttcaaaacatagccttttaatatttggtgtaacatatatatctattcaaacatgatatacataaatagaaagcccttctatatcctctaaccaaacgaaattataacacaaaaatgtagccctcaatcaaaactgttacgagcatatcaacatgcaactatagatattcaatatatcaattataatacctagtgacaataaaacgatcagtaaattagtaattaaaaagtgtaaaacatcatatcaaagtagatttgaatccgtattaaattggccactgcaattaacacggcggaaatagtctcaagattcctagttatagaaagaagtttattgaaattataatatacagaaatagtaactcatgttttcggaggcatataaaaatacacataaatatctatacacatgcacacacacctaactttgttgatgaatttaatagaaataaggtagagaaagagagagagagagagagagaaagattaaaaggaaaactaagtgtttaaggcaatagacagaagagaagatggggaagtactaagagagacgcacgcagaatatgtgagctaaagtgttgagtggtttttgtaatttaagattgatacgtaattacttacttaagccaaattcggttggtggaagttgagatggcttaagacaacttcacactatcacttttgtgtgtgtttttatttgtctcctcttcactctcttcttcctaagttcacattcttatccaactcacattcttttatcactcaaaactatgaatattaaagttaaatattagatcaaacatcaaaagaaatgtggtctagagaatatcttttagtatccacccatagactctttcatatctctttttttctataaattctttcgaatatccgtattatttataattaacaattcttgaaaagtttagtggttcgtatatataatcgaagaattcaatggatatcaacaaacggattgatgcctaattttatgttacgaaatgagagtttaaaaacgtataatataaaggagagagagactctcttttcttcatatgcatataaactttggttcagctttcaaatgtaaaagagttgtagaggacaaaaaatcaagagtgctattaaatatgaaagaaatacataatggtaaatggtggactttcttttttttgaaaaaggatttggtaaatggtaaatgttaaatggtggacttatttgtaaggaagtttctcttatgttttaatgatagaacatgtgaagtcttcttccacatcaacatgtccccacttatctcctaagtagaaaaaatcaccttaaacttgttatatcttaccgtcaacgaaaatttattaaaattccctttcttcaaaaatactattaaaactcaatggttatgtagaacccactgggaaattcagagctggcgtttcctcatccattctcatatattctcttatataatcccctttacaatctccacttcatttccatgcatcttactcacttcatcatctcttcttaaaccccaaaacaaacaaacaaacaaacaaaaaataccaaaacaaagaagaaaaaaaaaataactatggatcttctctttctctttttctctcttctcctctcttacctctttttcaagatctggaaactcatagactcaaagcaagacaaagattgctacattttagactaccaatgtcataaaccaaccgacgatcgaatggtgagcactcaattcagtggagagatcatttatcgaaaccaaaaccttggtttaaccgaatacaagttccttctcaaagccatagtaagctcagggattggagaacaaacctacgctccaagacttgtctttgaaggtcgagaagagcgtccttcgttacaagatgggatctccgagatggaagagttctacgtggacagcatcggaaaactcctggagagaaatcaaatatctcctaaagacatagacatcctcgtagtcaacgtctccatgctctcttcaacgccatctttagcttcaagaatcattaaccattacaagatgagagacgacgtcaaagtcttcaacttgaccgggatgggatgcagcgcaagtctaatctccgtagacattgtcaagaacatttttaagagctacgcaaacaagttagctcttgttgccacctccgagtctttgagccctaattggtatagcggaaacaaccgttcaatgatcttagccaactgtttgttccggtccggtggatgtgctattctcttgactaacaaacgtagcttgagaaagaaagcaatgtttaaactcaagtgtatggtacggactcaccatggagctagagaggagtcttataattgttgcatccaagccgaagatgaacaaggccgtgtcgggttttacttggggaagaatctaccaaaagccgctactcgtgcttttgtagaaaacctcaaggttataacacccaagattcttcccgtaaccgagcttataaggttcatgttaaagcttcttatcaagaaaatcaagattcgtcaaaaccctagcaagggctccacgaatctcccaccggggactccattaaaggcaggaatcaacttcaagaccgggatcgaacatttttgcatacataccggaggaaaagctgtgattgatgggattggacatagcttggatttaaacgagtatgatattgaacctgcgaggatgactcttcaccggtttggcaatacttcggcgagtagtttgtggtatgtgttggcttacatggaggccaagaagagattgaagagaggagatagagtttttatgataagctttggagctggttttaagtgtaatagctgcgtttgggaagttgtgagagatcttactggtggtgaatcaaaaggaaatgtgtggaatcattgcattgatgattatccaccaaaatcgattctgaatccttatttggagaagtttggctggattcaagatgaagatcctgacactttcaaggtccctgacgctttcatgtaaaacgtttacgcacaaaaacgcaaacgcaaacgcaaaaacaacacaaggtgatacaatattctctctttcttaatttcttcttttttgcctttagttaaaatttttacgtttttttgtttaaatggattggaaaggagatatgaatgtaaaagaaactttaattagttttttttttaatatgattttttttgggtgttataatttgttaattacatactttgaaataagggttttaagggacatgcacttccaatacgatgagaatttactaatttgccatcatattggaatgctgccttctttttttcttgttaaatgttgtatcaattttatattttttgtaatgttcatttttcactctatgttgtacttgtttcgcattaactcaagcttgccactgtacatattcattctatttttctgtaacttaaaaaaaaaactatacaagaaggaaattaaggaaaatattcaagagtcaagactataaatctcattgagtgtgaaaagttgataaataaagagtctgcagtggactgctgaattataatgttcagattctgaacatgtcttaatctacgtttcgtagttataaaatcatatttacattgacatgcaacattatttgtttttgctattttctatcctcagagcaattcatgccaacataaaggttttttaagaaaacgagttacaacacaggaaaaaaaaagtctgtttggtaggcaaacattcaatgggcatttgatttcattacctgattttgggccccatttgtctccacagaaaatgacaaaatcgtcatattaatattgccacgtcctcgactaattgtattagtattagtatttgattaggtacgcttaataaaaagtataccctaatacaatatagtaatactcctgcatgacgacaattttttttttgtttaagtttactaatccctcaatacatttttcaggatcgaattagttaaaacgtgtttagcaatcggaaaacctaataaatgcgtataactatacatcattatgtcagactgttcatggttttttatgccatcactttcatacggagaagacctagttggagacgttattatcgttcactagattatgagaaagcatcttctcaaatcaaaattggttctaatctgtttatttttgatgagtcaaatgtatcgaaatatccttttcttgagtgccattgttacaaggtttcaataacgttactcaatttaggtttagctaataaagcattcacaatttatgtttatcatcgtttatgggctaactaaaaagaaatatgataatgaatttgattagtaagtttaatggtatcaatcacaaagcaaaaaaagtaaacagaacaatagaagtatatattgacttatatatttttgtatcactatttttatacaacttcatcaacttttaccattactttttaccgttgaaaaactattatcgtttttaaaatcaattgaccgtacgtattgatatatttctggttagatactaaatttggttacagacttacagtatggttctgccacttactttatgaatctatattctctataactcactaaatataattccattttttcttacaacaatataatagatgcttctacatagttgttctttttttggattactcgttgataaccatagtttgcatttaaaacacattaatttgaatggtaaaacaaacgccattgtttaaaacgagaaatgaaaacccatgtttttcggatgaaaacacggaaattaaattagtagagtggtcgaagttcgtgttagtaaaaattgttaatagaatattttgaaaaaataataattaggaaaaaactaaaatggtaataaatagggacaggtaagagacagtagaaagagagcggtccaaaatcgaaagaaactaactttcttattaatttgccactcaaaaacagatgaacatttatttctcaactctcatttcgatttcacatgtggcactatgaggtgtcgttggatcttcttaaaaactatttgtcaaaaaaaaattgggatttgtatcattgtgtaccgaacacaacatgattctatttctctttggttgaataactccaaacaaagacgttcgtgttaataaaccataaatttactacctgatatcgtaattttccaaatttaatttgactctgaaattatttctttttctggattcattcaattttgagttaaagatctttttctgaattcatatttccttaatgcaacgttatttaatgtgaagtgtgtgtgatgtgaaccaagattgttaccatgatatggatgtaacgacccaaatctatttgggcttaatttgggcctaattctcatcaaaagcatacacgctcctcttctcctctttactacgtgcgtgtgtgtcactgaagaaccctagcaaagacaagacaagagagaggcagagagatatgttgagtgaggggaagggagatacaactacgagccgatgccaccgagttttactgccgccgtcgcgttgtgtttgtataaaagtgtttggcgggatgaggagaatgagagaagtacatcatagtaaatgtatattgtttattaaaaaaaggtaaaagcatgtgaaacaaagagtttcaggccacattgtattagtaaatttaggggtaaacttctaatatatggttgttactttactagcaaaaaactaaaacataatttactacttacacaaaatttgatatagagcttttattttctttttttttggttcaactaaatagatatactgtacagctaaatcaatatattgtcccttcaagaaaatcaaaagagatacaattggaaaaattcacaaacatatcttttatagcatgaatgatgtgttttaggttgctagaatcgaagttactggatcgggcacaagatacaatggtatgttaagtctgaaagaggaagaatgacagctaacaaaggcaaccacaacatctctgtagaatccactcgaagctgcaagaagaaaccaagaaattaaaatcctaagaactaaatgtaagtgaagagataaagagagaaagagtagatttacacatggtggagacaagaacatggtctatctctaggaaacatgagactgctgttgctattatggtccaacgagaaaacaaaagaaagattgttttcaagaacgtgactcttgttgcttgaaccttcaggagaaaatggttgagacagagaagaaacagaggaagagaagtcatatttttcacagtcaactccgtagctcacaggaagagaagatgaagaagacgacgatgaaccaactctctcctcttcgttcatttttccattgatctttctctctctttctctctctgctttgtgttttgaatctttcttgtctcccgggaaaattttgaaacttaggtgttaaacctaacggtcatcaactaactgttacaacaccaactagcttttattacttcccctactacatgcttaatctacttacgtgagtgacgtcaattcttcggttagaaaaaaaatacacgagtttcagagaaatgggcctcttaaaggtttatcttgggcctataatgtgaaattaatgactgggcctattaaaggtttctctttgacaactcatgcaattacatttatcgtcttaagtgaatcaatattgtacatgtaaataaaaattgaatctaccttaattatattcgctttatttagttatacacacataaaaacaaatgtcaaaagacaatatcaatcaaagttaacattatattttttttttaaaacttaacagcattcaaattttctatttaactaggacaaatctaatagggaaacgaaaaacccaaaaacaaaaactataatccaaaaactaaaatttgaggcaccaagtaaaattaagtcacgtgtgtgtgtgctttcacatctacgtacttgcgtgtgttattccctcgacgtgaggccaagttttttttcatttgacatttacaaattgattaagattatagtactagtattttttttgttaagaagattatagtaatatattattggtatgttttgtttttgtttttgttcaatccttcaaacatatatgactgactccaaaacctcgagactagatttgtgttcaaaaggttttgaagtattgtaaaacgatcgttaacttattgcattataattctaagaaattagtctgattaacattaaaaccaatgtttacaaaattggtaggtgctaattaaacagtcggtgatcaaatgcatgccgtctaaaacatttaattggagactaaccaatttttaggtggtttagacattcacaatatacaatattataaatataatttaatgtatcatagatgaaaattggataaaacttatgttattaaaaaaataaaaatattcaatcaaaaaataaaaattaaagaaaatatttatttgattcatatcaaacaaaatattaaatgataattatttaccgatatttaggaccatatatcgctttttaaaccactgattaaaacgaaaagaaaataatcttttgtcataaactcataatatagcaataaagtcatatatatattagattcaacatgttatcgacgaaaactgatttatttacttgaaaattaaagtttaataaaatcacaggttggattgaagtagtaggaaattaaaaaaaggctaatcacatattataataagaattaaggggttaaaacaaaaaaaaaacttcctagatcaaaattcgaaagttttcaaatcaccttttctttatttgcgtgtttgtcctttttcacaacggtcggatcacggattttacaacataacggttcaaaaatttaacgccgttagcatcctaccgtctcacaagtcaaacgccagcgcctgccgtaacggctcatttatttttatttttttaatcctcccaatttcatatatttttgctcttcgtttttaatttaaacctttttattagaaagaaactctttgcttcttatatttcattcatcaatctctcttcttcatcggaaatataaatctaccatcgccagaaaatttcaatatcaaattcgagttctccgagattgcttcgaggaatcggaatctaaactccgacgttcgttgtttgttcggtacattttcgactcatgtttcaattccccagaatttctggagattcggtgacgcattgaatcttccatttccgaatctaatcgcggtttctaggtttaatttggaatacgaattcgatttttgttaaatgtttaggacgtgattcaatgtattcttagaaatttgttgattagattgatgttttcgttagattaagaccatctccaatgcgcaactctatatttcctctattttacagttgactctataaaatatagttgattttactgcattgtatgcctctaaaatagaggaaaaatgtagagattgctcttttattagctcaactatatattctctaaactctaaaatagaggaaaatatagagttgggcatttgagatgctctaatggagtttaaattttattgattgtgattttaagcttgttttgtgtggatccattgacttattgtggtgattgatagagatttgtttctccgttgattgcagagagagagataagatagttttgttgcttacgaaactgtaagaaggtagagaagataatggattctaacaattcgaaaaaaggaagttcggtgaaatctccatgtcaaactccacgttcgactgagaagtcaaatcgagattttcgagttgactcaaactcaaactcgaatccagttagcaagaatgagaaagaaaagggtgtgaatatacaagttattgttcgttgcaggtacatttggtttattcctttctttttggatggtaacattgataagaagcttattgttgttgtttcagtgtactaatctttactctatgtggtttctgcagaccgtttaattcagaggagacgaggttacaaacaccggctgttcttacctgtaatgaccggaaaaaggaagtagcggtagcacaaaatatagctgggaagcagattgataaaacgtttttgtttgacaaggttttggtttagtctttaaggctttttagataatgtgcatcattataggtttctgacagaaagtatcatgcttataagttggtgaaatttgataggtttttggcccaacatcccagcaaaaggatctgtatcatcaagcagtttctccaattgtctttgaggttcttgatgggtataactgcaccatctttgcatatgggcaaacaggaactggtaagacatacacaatggaaggaggagcaagaaaaaaggtacgctaactattccaagaacatcatttgaagtttctttactgatggtaactgaatcctcatttgatggaacatatttcttttgttgccagaatggtgaaattccgagtgatgcaggtgttatccctagagcagttaaacagatatttgatatactggaagcacaaagtgctgctgaatacagtttgaaagtttcatttcttgagctctacaatgaagaactgacagaccttttagctccggaagaaacaaaattcgctgatgataaatcaaagaaacctctggctcttatggaagatggcaaaggtggtgtttttgtccgcggattggaagaagagattgtgtctactgctgatgaaatttacaaagtcttggagaaaggttcagctaagagacgcacagcagagactcttctcaacaaacaaagtagtagatctcattcaatattttcggttacaatccatattaaggaatgtactccagaaggggaagagattgtcaaaagtggaaagctgaatctagttgatcttgctggttcagagaatatttcacggtctggtgctcgagaggtacctaaaacagtcaggaaccatgattttttattgacagaataatagtgtcttaccttgatgatttactaaacaatataagagtcactattttgcagggtagagccagggaagctggtgagatcaacaaaagtttgctcacacttggacgtgtcataaatgctttggttgaacactctggtcacattccatataggtaacagaaagattctgccttcaatatctctctctcgggaagttttgagacaagatctaatgtttctaaccatgtgattatacacatttaaatttcagagaaagcaagttgacaagattattgagagactctttgggaggaaaaacaaaaacatgtgtaattgctacagtttcaccctctgttcattgcctggaagaaacactcagcacacttgattatgcacaccgtgcgaaacacatcaaaaataaaccagaggtctgtcaaacatatgctgctctattatttctgccagtttagttgtattaacacaccttctgcattcaggttaaccagaagatgatgaaatcagctattatgaaagatttgtattctgaaattgaacgtctgaagcaaggtatatatttgttacatattgatgatctcctttgcttattaaatacttatatgtgaatctcttgggttaactgtctgttcttgactgtatcagaggtctatgctgctagggagaaaaatggaatttatattccaaaggagaggtatactcaagaagaagctgagaaaaaggtacagttcttattaagggataagtgccttagtcatgaaacaatttttagatgctagattcagacatcattctttatcggttgctgcaggctatggctgataagatagagcaaatggaagtagagggtgaagcaaaagacaaggtgagcagatcaacttgaaaggattatagtgaacatttgtttctctataaattttcagttgattccttcccagctaacagatatactgacttttctgattgttgatagcaaattattgatcttcaagagctgtacaactcggaacagcttgtaactgctggattgagagaaaagcttgacaagacagaggtagatatcacaagttcttgttcttgcttgttgccgagctcacagttcccttttaactgacatgcaaagattacattattgtactctttcttctctgatttcagaaaaagctctatgaaactgaacaagcattgctagatctcgaagagaaacatagacaagcagttgcaacaattaaagaaaaggagtacttaatatccaatctccttaaatctggtaagctggttatcgattacaaactgactttatttcgatgatactccgattaacctttttcacattgcttcagagaaaacacttgttgaccgggctgtcgagcttcaggcagaattggcaaatgcagcatccgatgtttcaaacttgttcgccaaaattggtgtgtattacttgctttctcttctctcccactgttatcatcacattctgaagactaactgaactatttattccagagaggaaggacaagattgaagacagtaatagatcgctcatccaagatttccagtcacaattgctacgacaacttgaactcttgaacaacagtgttgccggttcagtaagccagcaggaaaaacaattgcaagacatggaaaatgttatggtttctttcgtatctgcaaagacaaaggtaacaaattttttccttaccttcttaataacactgtgatgcctctctttgattatgggtttacacattgttttatcttcttctctgcaggctactgaaacactacgaggaagtttagcacagttgaaggaaaaatacaatacaggcatcaagtctttagatgatatagctgggaatctggataaagatagccaatcaactttgaatgacttgaactcggaagtgacaaaacattcttgtgcactggaagatgtaagaagagaatcatgtagtcaattctcttaaagcactgatatattcttttaattgacttttgatcgattatgaatcagatgtttaaaggatttacatcagaagcttacacgctacttgaagggcttcaaggtagcctccacaatcaagaggagaagctctctgcattcacacagcaacagagagacttgcattcccgatcaatggattctgctaagtccgtctccacggtgatgttagacttcttcaagactctagacacacatgccaataagctaacaaagctagcagaagatgctcaaaatgtcaacgagcagaaattatctgcattcactaagaaattcgaggtgggtttttttgctactcattgtcaatgacatttagcttcattatgttaaaattataacgatatatattgttcttctttcggtcatttcaggaatccattgcaaatgaagaaaaacaaatgctcgaaaaagtggcggaattactagcgagttcaaacgctaggaagaaagaattggttcagatagctgtgcaagatatacgccaaggatcatcttcccaaacaggtgcattgcagcaagaaatgtctgcaatgcaagattctgcttcttccattaaagtccagtggaactctcacatagtccaagcggaatctcatcatctcgataacatatccgcagttgaggttgcaaaggaagatatgcagaaaatgcatctaaaatggtaatcacttctctcttctattaaaccacaacaatttcaactactttcttatcttttatgcgacattaaaacctttgtgtcatgattgatccttagtctggagaattcaaaaaccggaacccaacaatggaagactgctcaagaatcattagttgatctcgaaaaaaggaatgttgcaaccgcggattctattattcggtaaggcacctttctaatgtcattcattacaacattctccaaattcaaatcttctcagtctcaccatgttaattgtaataaacacaggggagccatagaaaacaatgagaaactacgaacgcagttttcttccgcggtctcaaccactttaagcgatgtcgattcttcaaacagagaaatcatctcatccattgacagtaagttatcataattcgtttttttttcttctcatatttctatccaaatttataaccaatcctcttaactttggtttcgcagactcgttacaactcgataaagacgcatcaacggatgttaattccacaatcgttccttgctctgaaaacttgaaagaactaagaacacaccatgatgacaacgttgtcgaaatcaaacagaacacaggaaaatgtcttggtcacgagtacaaggtaacacgatttgatccttttttatataatcatcatatatacatgattgaattggacaaaattgttaaccgtaaattaaattccctgaaaacatcaacacaggtggatgaagcaacaagctcaacaccgaggaagagagagtacaacattccaactgttggatcaatagaagaacttaaaacgccgtcgtttgaggaattgttgaaggcgtttcacgattgtaagtcaccaaaacaaatgcagaacggagaagctaaacacgttagtaacggtcgacctccgttaacggccattaactgaagcttttgtatgtgttcgagttccgtgagattttataggaacacggtaacagagtgtatatagaacgatcaaaatcactctctgtttatgattttttgaactcactcttttagttaattttacgttttttattatgatagagatcatcaaattcccaattatggcttatttttataactttgaagaatcagattcaagacacaaaaaaatatggatcgtagttaataagtaatcacggcgtataattcttgtgtatcttgttatatagtgattatatgaaggaaaaaaaatagtaagtgcacgttgactatgagagaagcagaacagagttcagattgaacacaacttctatctgtttctaaactaagttcttgttgtgttcttctccttaaactttcattcaaatatatccctaagcccactcttagaacttcacctatgttattcgttatgcctatatattctgacatcttttccttttaagcttctcttgttctatatatgctggattataaatgtctctatgttctctctcaagaaaccttatgataacaagagtccaccgtcaaagccacctaataacctttttttaatgccactgatcaaaattacaacccaaggtttcaccaacttctaggatctcaccaaaattatcctatgtataaagtttccatagacaatcccttgtttcagcagccattctttcttaaagttttctttgttctttattgtgaggtgcctttgttggttcaccaccaactccaccatagctttttttttaccaagaaatgggattaggtcgctctcctgaagcacacaatataatgccataaggcccataactttaaaacatgtatatttgaaatcttttacgctctccatgaataggtcattcacacatttttccacaacacgactcttatgacttcactctgaatcactggttccagtagtccttttcctaatgttacaagagcacatgaactacccactaattcttacatttttttctattgtaaaatatttctctcttgtcatttccataacaataaagcaatctgccaaaccaaaaaacctgataaatcaacctcataactaaccacttacacatctagctgcgccagaactgagtttttttgttcaccatctattgaactttatcgatttttttcgagtaaacaatattttaaaaatcttattatatataatgcatgtgtttttaacagtttgtttataacacaaaaaataagttaatttaaccacaataatttatttcccatacatttttaacattttgtatataacacaaaaacgtaagtcatactatatttattttatctttttgccaaaccataaaaatatgtgatgtgaagttgtaattagtaaaaaagctttgtaatcacttttaaattattatcatcatgagaaaataaaagagagaaaggagagaatcatagtacatatcaaaaggaaaggtgaccacatcaaaataaagagtgaagttacacgttagacaaaggagatctttctcactgtctagtcctaaagacaatagcctacacatgcatgcatgcaattacagaaaccaagacacccattttaacaactcataataactcccaaaccccatcaaagatcttataaaaagaaaagaacttttaacaaaattaatttaaagaaaagtacccattagttctactgcggagatagagacatatgaaagaagagagagagagatttgtagttattcaacgaattatatccaacggctattactttaccctcaagtacacgtgttttcttcttagcctttgacacatcatacagtgatacatgaatgaaacacctgcagaatctcttttgtatttgttgtcttttctttaaagtttggtactgtcttgtttggagttgatagatgagattgggaaaagttccagggttttcaatggtatctttggactgctcatcatcatgttacaacatgaaatgggtgatgatgatgatgagggatatgatggtcgtgggcccatatccatcatcatcatccaatctcgaccgtacgatgagtttggacccgtgattgatttttgcatcaatatctcttcagctccacttttggtgcagtaatattcattcatcactttgcttggagcttctcctactccagttccctatattttccataacaatgatcatcatacaatataaaactaacaaaagaaaattgtagtaaacatattaacaagttgttattcctttttaaaaccaaaaaaaaaatttttttattctagaccccaaaaaaagtattctcacttgcagctttcccatctagccatgtaaacagggtataatagccaaaaacatttggtattttaaaggtttgaaattagtgtttccggtaattaaaaaaattatcataaataattttaaggtttgagattagttcttcaattatgtttttcttcttctttttgtaggtatacaaatgttttggttatatccatatgtaacctagctattttgatgataaacattgcattaaaaaaatcttatgaaagaaaaatgtttaacaaaaagagagaaaagtagactcttcttaattacatacctgatgaggaagacacatgggagaaggatgagagcagcaatcaaaggacatatgatcatatggacgatgatgattatgatgatgattatgatggtgatgatgataaggattgtgatgatcgatgatattcttattaactggttgagaaatcatcgatgatattggttttggtttgatctgctgaagttggagttgaagttgatgttgttgctggtgaagttgcttggctagtttcttcctcagcttctgtctatctctagccttatggttctggaaccagtaaaagacgtttttgccctcgattcttccatagaacgccaagtgagctgtgatctgttgtatctgcaccgcattcggagtccgtataccactccggtacatctcttccaagatcatcagttgctccggcgtcggacaccacctcgttgaagccacaggactcattctccgttcagacaaatattgatgctttgtgtgtgtgttctctagtgatgctatctccaaacacttagggttatatagagagagatgtgtgtgtgtgtggatgaggttatttatacgcgaaaacggatgtttatatggttagagagaaaatggtaaagttataaatattaaagtgcattggaaagggacgcaagagaaggaagggttagacagaaaataaacataaagaaagaacattgtactatattgttttttatgttgtattcaaactggcccaatctcatatgctcccaaaattattacattacgtactctacttctgtaaatgtgaatttagtatatatgtataaaggaatatattttttggaataactatagttttcacctttcaaagtttattttgtcgggagttttcactttcgtctacagtagtgtatattaatataggggatataatcgaacggcacataattcaaacatcattggttgcaaaatgcaaataactcaaacatcattggttttaaatagaaagaaacgttacataatcactttgtaaaacatataatcactctatgtaagaaaaaagttttgtagaatagcttacgacattctccaaaattatgtgccttttctcttaaaaggggagagaaagagaaaaggaacaaaaatcaaagagaaacaatgaaggtgtatgggttctcgaggtggatcattcaataggtttttaaaatatatacaattctctcttacaattaattaagacattgactcatccttctgtgtacaaacataaaaccacagtctcatttttatttttgtgcagaaaggtgaaacatacaaaacaaagagaaacgccagtactcattaacaaatgataaatttacatttttatagattataaaaagttccacaaaaaattataattagatattatcactaaaatatgatcaatcatatcaagacctagaatatataaacatatgtgtacatatgtatctgtgtgaatatgcatgtatgtagagagagaatgaagagaaacaattaaatgattatgtcataattactttattatgatttacttctctcaacaggatgacgttgacacatcatattaaaagaaaaaaatggttaaatttctcaaatctttacatggacagacaagctagtaaataggtacaccaatgtgaaatgaaaatatacgcgttctatgtattaattatgttttcatgatctaacatacaccattataatcagaagtacatttacttttaatttacacattgacatgtattgatttaacaaattttgtaaattaagacataaaaatgagtttcaaatatcacatcaggcatagaattgtctgtttagaatctccagaaactgagcattttgactttaacgtctgcatgcaaaaacattgcatgcattagcattcgcacctatatattagttgtctataggctccaaagccctgtctctgcccctctgtcaacattcttgattctggatattcaattcttttgggactaaaggatattaatgtcctcttctagaaataatcatattgaaattccacatttttaaattctacattaccaataatatttcagttaaaaacctataaagtttatagctcgatttgttaggtttggtgaagaaagtttcaggtcggctttttgaaaagaaaataaaaaaagagtttcaggtcggtgatataaccgtaaaaagttagatatttaattttcatgatttagttcaagtaattaaagtcctatttattaggtggctatatatactaacgaaaacacaatacatatacgtatcttaatgccggagtattagtttaggttgattggttccggcatgcggacatttttacatacacatccaaaaaagttatttattttgactgaagttagataatagagttatttttatgtattatttttataattaacttcttaaagaatttttcaattaatcagttacgtgaattctgactcgataaattgaattctttttatctttctctatttttgttcataccacatataatgattgatagttcagaaattttcaatttgacttcatagtgaattaaaaataatactactaatcaaaactgtcataatagtaaaataccaaaggtcaatattattgtattgagaatgaattttataggccatgaaagtaatatatatttattatcaaagagaaacgcaaaaaaaaagaaaaaaaaaactttttttaaactgatcatgcataactggtgtttttttaggtcgaccgcatgataccaatctaactaaccatatgattagtaaaagtaagtttatttagaatcgatatctttattttttcgatattttctcttttatttcattgtaagaaattacaggggataaaaatactaagagacaagactataaatgcatgcatgcagacaaattgcaatttgcctctgcatttccttttaacactgtctctttttcaattctatttcccaaaaataaaaagttgttgtattcattcacataaatgcgtagtgttctgtcaacattcttattaaatcctaaactgttggtaaaataccaaacagctcttttgctgtttcgcatttcctctcttttgtccctatttgtctctttttcaaactaaaaattctatgagaacactttattgcacaatgcaagtacatattgcttccgatttttaatttcattcacgtacacacgtacgcgtatacattaatcatacatatactaatctgtaaactatttgagatacgtaaacctacaacaacgacgtaccaatagatgaagtaattgcaaagttggaccatatgacaatgtaatcgcaaaaagaatgtcaaactcatgttcttttcacgttacaagtttgctacttcaatggaaatatccaaaaaaaaaaaaaccatatatacttttatctaaattttaccttcttttttttttttaattttacccattcatagtaaatgttttgctgttctattaataataaaataatatataattttattcatatatcacaaaataaaattgataatttggatattgcaatttcgaaagtgcatgttggttgtagttttttattgactttaatatttttattttatttaaaaatgtcacttagcttactgaattaaatacttttatttttaaagatggtatgaaactgaaaaaagaaaaatttctaatttttctaattttggttccaaaagatttcatccttgtcgaagtctaaataactattttcagcttttatatatggcatcggtattttaattatatatataggccataaattatttccagtttttacaatacacgataattgtcacatttaccatacttttttcaatatatttgatttcgttttgctaattttaaatccttttcatttcaactccaagtccaagacatactattttacaagcttttcccaaatcctagagttttttctttcctattttaaatgattatgagcgacgtgtcagtgtgtaagtcaacttacttgccaaaaaaatgagattccaatatcaaaattaaacgagaatccactggataaacgagactttaatatccttgttaaagcattgccaacgaattcctttaattgtgaagatcgttaggaatttctgaaactctctataaaaaaaccacacgttcaagataatggggctttaacagtgacccttcaatggattattttgtcccatcaatatgtacatatgatcttaatttaatgtttgtgaattttgttttatctttaaaagagggcttcacatcagtatagtccaacatatgaattatgttattatctatatttcggataatttgatggttacctaaaatttatttatattactagagatgatatgtgcgctcgtatatatcaattattatgtgaaattggtgaactatatttatgaactttcaaaagtagtttctatttctaaaatgaaaattgtagtttttggaataagtcaactgcaagaaagtccatcaaaaatacgtaaaactcactattttaaaaaataaattaatcgttaaaagatataactcagcactataaagaagtggaaaatgtttaaaatcatccaaaaaatacatccattccggtatgatttttttgttgaatacatggaaatcaattttttaaaataaaaaaattgcataatcaaaactaaaacgataaaatatatgtaagaaattgaataaaatcaatactaaaaatgataagtttaatgtgaaagaaatataagtttattcacattatactctagtatatattgatagatatgacacgttagttgttacacatagaagatttgattagtgaagtagcaacaaggttatatatatacaaataaaagagaaaagaaaacaaagaaacaaataaagagagagagatgatttgacgagtgactgatcaaaatatggcagactgtccgtacctttcttttctaagttctgaattgctgacttttctgttctttctttcttttctcaccccaaacacaattaattaccaatcttttggagtcaatgctcttatcccattcaaatctgaaatctccttacccaacacacccttcctcacatacattgacatttgacacattctttgttatttctcaattagtattgtcctttaagtacataaaatgattgtttttgtaacaatgatgggtaatttatagtttacactaatgttgttagtttgttgccatctagggttcatctaaaataataataataataaaaaaaaaatctagggttcatctttaggaaaaaagcatgtcgacaaaagagaatctaaatggtcgatgtgttcaatgtttagtgcctcatgggatttttcaaacgtagcactatatcaaagattcaaagtgtaacgtttaagacaaggaaaacaattgttagcataagaataactaagtttgtaataaactatatttaaatgcaaatatgcaatatagtccgatacgtcaatcgttctacaaaatatgttttgaagtatttaatagcgttacacgattgtgtgaaacgatttttgtatagttttaaattcatgcaacggtaataactcatacacaatctctaatgtacatgagcaatcacatcgcgagttaactaatcatagatataatagtatatagtatagcttatcgcattatatgcatgtttatgatgatatctgtttttttttaaaattgaatatgcacgacgcaacaggagtggtcaaaaccaaaatgtagagaatttattatgttcaatagggaaacttaagattttacctctgtttgtctacttggtgaattatttagggtgaatattacaattattattatcatgatcatcgctgtggaaaattagtgtctcattaggtactgttgataaacagaaaagttagaccgtaagatatgataattctatgccaaaattaatcacaaagccataacgtgtaacacatatataccatctttcttcttcttttatacgtatcatttaatttttcagttaaaaataaactaaacagttgggtattttctgaaagcaaaaaataaactaaacagttgggtattttctgaaacattttattttcatttttgacaaccaaagagagagctctctaggaagtagtagagaagaagctacgaatgttttaagatcgggccaacgtaccaatcgaacccaaccctggtgtcatgtgttctctgactctgagtgacacaaccactttgaacggggctcaattggtagttcacaatgacttgtaatctaagtagtttgtgatagtgttatcattgtacatatcatcatccgaattcaaattcgtattttattttatttttggatcgacaaagtccgatccatagtcaaaccctactatgccgggttatgcgatttagtggagtggaactccggtggggaagacggaaaaatggacttaaccatttgactaaaggcaaatccgaattcaaattcgtatatattgcatgttatttaataaaatgtgacgtttttttttttgtagagatgcatatccaaatgattgttcagctttgctgcattagcaatgataacgtcgttttttcggattggcctgcctttttctcaatgttagatgcaaatcatatatttttcgtccgttatttaagactaattgtttggtttcgtagtacgactcgcaatcagaacgaagttgttataatttaaacttacatgttgacagaagaaaaagagaatgtccacaaagaatgttaactaggcaacagtatttgtaacaaaagaaatctcagatttattgggctcaataaatgactacaaaagcccattaactcaagaataagcccatcaaacaagctcaacaaggaaacagattattgggtttggtggtcatgtaagaggcagagcatcaaaggagtgaagaacttgttccaacgacattctcgtacttgaatccaatggattctctggtttatctgaatgaacaacattcaatagataaagcttgttagaactcacaaacgcagctgagaaaaccctcttgattcctcctcttgtactatcaattttgtattcaaactcatacacttgttgtcctaatcctgctctctctcccactgatacaacttctgcttcctttgtgctttcctaactcaacaacaacaagaaccaaatcacatacatgtttatacagaaaatcttgtttttgggtttgtttgttttcttacctttcgtttctctgcgttgataagcttatcagcaacaaattgaggagaaccaaattggtcaaggctctttatacggacaggactaacaacaacaccaatattgttgcttccattgtttagttcttcaaacagagcattagctcctgctttctctacctttgtataagaagagggtatgagaagagtgaagccattgttggaatcagtgtatctttgaagttcttccatggatttggctttattatccaacaagaacccattgaagaagagtgtgagaattgagagattcaaatgtcttttgctgagattgatgctaacagtggatgatggattttgggcaaagcagaagaatttatggatcttgtgatgagagaaaggaggaagagaagatgagaagagacataatttgggagcagaacctaagaagctttgcgaccacattttgcttctttctccttatcaacaagttttggatattaattactaaaagatttattttggacaaattctcaaaaataccactggaaaaaaaaaacagaaaggaatcattagcacaaaacttgatggtctactcaattcaatacacagtcaaaatgatcgctttaaccaaaattctctgatggtaaaacttctgaaagccattgttactaaaagagatggaattggagacaacatttcatcaatcagacatagcaacatccatattcctccaacggtcaggtacgttctgaccacaattctccaggacattcaccaatggtccagcttgataagaagcagcatccttttctgttatatagctgtgaagtacgccgtgagcactctctctagccatacttgtcagaatctgagtgtaaatttcgattgatgggaaaaagtctggaagtagaacggtttcagagtccctcataactgtagtatccaactgttcaaaatcaatcaagtgcgccacaggtttccggctgaaacaaaagccaaaacgaaaaaaaagaacaaatcgtaagtatgaagaaagctatggtctttcataataatacgcccaagttgagaagctcttacctctttttgacctctgagagttttgaatcactactggttgatacagagatacccttgagcttaaggatagccattatctttttgaaactttcctccttcgtaacaatgtatattaacttcgacgaagatgaatccagatgctttgcgaactgcaacaggtaacagttcttaagtagatcgcaatagaagagtccaacacttttcatatctaagccatctattagtgaatgctacttccattaactgtttgttttgaatgtccaaaacggtaaaactttaccaattttgctttcttataaaatcttacattcaaaaaactttcaacctttatataaattagtgtatcaaatgagtcagttgaaatgacgtaccttctgcagttttttttcctccgaggcgcatacactaacagtctgggtaatacaagagccttggctggcaacagactcattgacagtaactctgttaactgatccccccaagaaactctgtacggccggaataatggaagcactaaaactgttgttaaaaactatagtttggtgtttgctggaaatggcctgcttgatggatttaacagcatttagataaccaccactgcacagtgaacctagttcatcgatgacctgtgtaagtgtaagagaacagttagcagtgttgaacgctctttaatgtagaataaagagaccccatagcatgctacatggagttaaagggagaccaaccaataataaacataggaggatataaagatgtcctccataactttaatgccagagaaaactaatatgaaagtgagcttttcttattgtggaaaggtggactaagtagatacgtagctatagtgatcatgattcaactaaagtagagaattcagaatgaagtttggaagccttcctagaccactactaagatcctttagacactcaaagcaatcaatactgggacaaacttcaaacaaaaaaactgggcaaacattcagaataggaaactaaacccaatccatatcaggcagcagatatagatggttgatagtatattattgaaagcttgaaaaggaacaaaaactaacaaatatctttgaaacaaaaaggacctgccaaccttccccactacagaagtcgacataaaatcttaagtgaaacaagtaaatttgaggccttagtagggttttcatagtaatacgatttggacatgattggactgcagtataatgaaacataaaacaaacaggagaaagattttagcataccagcaatgaaacgttggatatatcaacacccttcaaggtaacaatctccaaaagtctctcaggtgtagcaactataaattcaggctcaacgctttttaatctacagttcgaaaggcaatttgtcagaattggaggggacaaaaaagagattatcctttatgtagcaacagcataaaaactatgtaaaacagaaaagattgcataaggaaaaagatagacaatgaactgccttaatgtacccggaaatctgatgatctagtggtgctccttggtgtaagctcacagtatgaattccaatacctttcagtgccttgcaaaccgatcgaacctaagcatgataaaaacacaaatgactgcattatgaaaacagtttcactctagaaaaaagacagtcacactcacgagactaaaccgatgtgatcctaacctgagaagctttagactgagatggcacaaggtacaaaagaaaaggactgtttcccaacaactcctcctcctcctccacctcgtctttctcccgtctagcaatagcatcagcagcagtagaaacaatccaagcaatctgttccacagtggaagacattccactcgtgtccaaaatatcattcccagatgagtaacatttccagaactcaatcccccaactactagtaaacaaagacttatcatgttgttcactgtatgtaatatctttacgaaatgagctctcaatctcattcaagtttaacatcagaaactttggtggaccatccatcttctcaacaccttcaatagacataggagatggtttcttgtcttctctactcttcacctttttctttttcttcttctttttagtaatatcagctttaccttgcctttcattgaatggatcttcaagtgtaggaagagtaaaacacattccctatgattcaatagagaaacaaatgcatcaaattcaatagattcaccaaacacttcaattaacagatactcttctctgaaattgaacatttctgatttcctagaaccctaaaatcgaatagaaaagagtgagatacctgacacatgctgcgtttgccagacttgcgacgtttcttggcggcgataatggcggcgatacgagcagatacggtggcggtatcgttcttcctactcatcttcttcctcgtcactttattcttcttcctctgcacattatcgtctcctttcgccatttttccccttctttggaggttagcttcgcggcggccgttgcttaactttagcttccgcttccggattgtttgttcgggtctctcctttatatagttatggcacaatcgtaatttaacagaagctttgaggttaaaatcgttatttagaacatcatacaaattcgtttccataaactggtttggtgataaaccggactttcccatacgtaatggtttaagattctgataaaccgaacttttgctacagtttactatataagtatgagtcgaaattcgaacaaaactgttgcttacgtaaacgaagcattctacaaatcaagaaaatatcaaaattttaagaatcctcattgatgattaagttgcttgatctgagcatatcttgatctcttgtttctcctccacacaaacattagattctgtggtaagtgttttctcttcatcgactttagtctcggtcacattatcctgcttttgacggtgactacgatcatatttagaagaagctaagtgatccaaagccattactacatcagctatcaccggtctcatactaggctgttcttgaacacacattgcagctattgcaagtgcttgatacaatcctctaaccggataatctccttcgagtaacggatcaaccattttcttgaaattcttcctatctttaaacaagggatttgcctgtaacattacagtcaaaactgtgaattatgatgctcaattagaaaaaggagaaagagatgtttttagtctttacccattcaacaagactctggtgattacgtgttctcgtgttatcgtaagctttccttccagtaataagctccaaaagaacaactccgaaactgtatacatctgatttgaatgtgagttgtccagttaatgcgtaatcaggagcacagtaaccgtatgttcccataactcttgtggaaacatgagtttcacttcctcttggtcctactttagctaatccaaagtctgagagttttgcgtgatatccttcatcgatcaagatattcgaacacttaagatcacggtatatcacaggaggtttcattgtatcgtggagatactctagtcctcttgctgcaccagccgctattttcattcgagtgttccaagcaagcgggtttttaccagaaggaagatctaaaaccaaacagaatacacgaaaacaagttaacataatcaataaagcaatgtgatgcaataccaatataacataccatgaaggtgattatccagagatcctagaggcatatactcgtaaaccaacagtctctgaacaccctcagcgcaaaatcctataagcttgacgagatttggatgatcagcgagacttaatgtcaacacttcaacaacaaactccctgattccttgagcaccattccgatcaagttgcttaattgcaacaacctatcgaaacaccattcacaaactcttaaaacctctaaccaaactagccacaatacactgtaactcattagatcaagatacaaatactaaacctgattgattttctcaatgaaacctttgtaaacttttccaaaacctccttctcctagaaaacaatccgacttaaagtttccagtagaaacagagagttcttcaaatgtaaaagtctgtgctttcttcactataacttcatcttcaacattagtatctttagcatccaaagctaattgatccttcttagtaactatctccttgcttacatctccacatatactaacttttaaacaatctacgcaacaaagacataacaacaaacacatcagaacgaatccataaatgcaacattaagaacacaaaacctaattatcgcaagattctaaatttcgaaataaaaatcgattttttatgcgaaatcaagtcgatacctgagctgggttgtgtcagcttatctcgatttgcattgacggtgagtttttttggggtgaaatcgttgttcttcgtggttttggtatctgatcgtttgttcgatttcggagtgcgtccgaaacatcccatcgctaaagctagaagcttttttctcacgttggagaaaaaacccctaggaagtttggaattagacacagagaattggaaaacggaaaaatctgggaaaagaagatgaagagttacggaaaaagaaagagagacagagagagagaagagggtaaagtgagagaagagatgcttaatttgaacttttttaaaggaagaagaagaagaaacgtaagttattgtctacgggaaggtgtattataagggttattaatagtgaccaataaggtgcgtgtagttaaatttgggtcttgtggagtaagtcaaagtgagatgtgactttgtgggagctgctaggtcaaaacttttttgtatgtcaagatatttgtcataaaattagctaatctttcttaaagctcaccaatcacgaaattatgagaagatatacgttgtcaaaggactagagagtcctcatgtatctatcacgcccattcttcattgcttgaatgtcttggaagcgtttcatgaaccatatcgtcgacacttcatcatcaggaggatcatgtagcttttgatggcatgtatcttataacgatggaagatgaagatcatttctaatgggacgaaaccaggtctatccatttgattaaggcatggttaaccacttcgagtggtaatatatccaaattttggaagagatttttttctatgttgtgtcttttaaaagataaatcacaaagttcacgtgaattgatttacattgtggagagtcaaaatggttaaatgttgtcattctaagattatttttggagttgatggaattggaaaggaagcttatgtatgaagaattgacggacataaaaactggtgtggttgttattttctataaggccatgtttagagcataatccatcttacaaaactcttattgctttaagaggtacgactaaacaacacataaagctgaccaaatattaaaaatttctgatttttgatggaccatttataagttttagcttgaaaagatttagaaaagtgatagatcctctggttttgtgaactgtcaataaagcccacctttcttataagctttacttgtggctaaacttgttattaaatatatctttactggttggatgacttcctcccaaagcacatttttttttagattcacaaagatagttacaaagattatttttagctaattctcctgaaattaaactttacaaactaatttttttcaatattgattccaaaaaatatagaacctttggttataagactcaaaagattaattagtacattcataaattttcttgttatttgcacccctccaaattcacactgaaaactaagtaatataatgagagaaagaaatttaactttttgaacgcaaacaatactttatgattaacttgaagatacataacgaaaatgatggatgatgtagctatggtgggataactaaacaacgtgaaaaagaagcattatttacaaagtcgattgaaagagaaaaacagttaaacataattttgtgtgggaaaaaaaagacaaatatagtttggtttcgtatataacaagaaacaatctatagtccccgggacggagctggaggaggcggagacttattgtcgttctgcatcatcacttggagaatggaagccacagtctgaattaaagtcaacacaaggagaacgactgcggcaatggtggcagtaccggtccaaagatctttgaaataaactcgccgaagagtgccgacagatctgttgagacgattgtcgtagtgtttgttgaggttttcgactatatcgctatagtgagatccgaaatccacgagccctaaacatagcttgtttaccatttctgtcactgatccttgatgtcctaaccagttctttacaattcctttcaacgtaaaatttgttacaaatcttagaattgagagaagaagaaaaaaaaacgtcggtaacttataatatgaatatccaacttggtacctttcttggcgagcaagtcaacgtcttgatcggtattgatgaggaaatccaagaaggagatgtagtcacaaacaaaagtagttcgagggtaatgacattgctcgagtgccattaaattcctcacgaccctctcggtgttgtcttccactgtgaaacaaggcattttcaagattccgtctttgaaagtaatcaccaacgataaatcattttcttcatccacattcacaaaattcactcctgcactgtctagtttgtctgcgttgtacataatctttctgctcttcggtggctcgttttttgctatgttaatttgttcttctgtcaaagaaagtgtgctgacacggacacaccgaaacaaatctgtaaaatgttggaatctcacttcttctttgatctttccctcaaacctaaaagctcgaagggtaatatcacgaaacgtttccttagtattgacatttgaggaaaaaggttcaaagagtttctctaaaagggcataagggagttggttctcgagcaagattagatcttctaaaatggcggtagcgtttatgagacgactctggttgaaaagaatatcttctttcttgttgaagtttagggtacttccggtttgaatgaagaacaatagtatgaacaccgagtcgtggaggatcatttctacgaaatctttagtattgatccatattgttgactcggcgtagctatctcttatgaatttctcatttatttcgatgattctcctgaactctttgacaggttgatccccatatatatctgcaatactatcaaggcacttcttcttgtgaagctccatgttcagatagttcaaatatctagattaaccatacgtattagcttgactttttaagcaaaatctataagtctcaaacaaaaataatactagttaaaatactatgttgttacttgttaccttaaatcggttttgtagcgcttgagggcttcagctttcttggaatggtgaagaggtccgattagcagcatttgaggagtgtaagcctcggggttcactttgcgtaaccggtctggtactctatagatgcaacaaaactctggtctaacggaagaagaccaaagaccgggaatcttagaatccgccggttgagtcgtctctttagaaagccgtagatattgaatatatccttcgcccattggtcttgttagcattgttcctcgttctagatccgaaaaaatatgttccttctcctacaagtaatagtataacaacaattgataaaaaaaaaacacatacacactaacacacacacaccggaacctactaaatacgtacctcgttgtttttaaacatctcgcccagaactgtgcttagagatgtggagggctaatgccaaaaaaaaaaaacgattaatttttttggataaaactaaataaatgtaattgttttacaaacaatagtcatataaactaccaaaacaaaaacaatagtcatataaccaaaagagaaataacatatagtacaactttctatgatgtacagctataatattttaataaatgattagaaaatatcaaatctgtatgctgtaattatttctcttatagtccaagtttatcatcatattttttttctagctgaaattcttagggataaaaatataatattttccaataaaatttataacccaattgaatctgctaaatgtgttatcaatattgaatacatgcatacctcattgtgtttcaatatctcacccagggcggtgccgagagatttgtggtgctaaggcaaataaaaaaatgaaacgttaatattatttcggataacatatgcatcgtaaataaagttcaatgttttatttttaaaattaatagaggtaattaacactatttttaatctataaaataaaatttataatcaagaaatataacactaaaatgcagataataggaccaaatagtatttatacctctttgtctttgaacatctcggtcagggtcgtgccaggagacttgatttacaaaatttatgatacatattagtgtttagatactatatttattgttttttaaattaataaaataaaggttagagaggggaattataaatggtcagaactaatatactaactggctagtagaagacaagaaaatgataacaaacatcaattaagaaataaattttatttcctgtatatacatatatacatatacacatatttaaatgtatttgtttaacaaaccatatatttaaaagagaaataacatatagttaaactatttatgattttcagctatagtaatttaatagataattagaaaatatcaaatttctgtattgtaattatttcttttttagtttaattttatcatcttatactttattttatttttctagctaaaattcctagggattagaatatgttatttttattttatttttcttaacacacatgaacctgctaaatgcattatcaatattggatacgtacctcgtcgtcttttatatactctcgcttcatgaccattcctagagattctgaggactaaactaacacgaatagaaaaatgagacgtttttaatatatatggatcgtaaataaagctaacaactatttatatatatatatataatactaatagaatt

SEQ ID NO: 301 - DNA, 17599 bp, Arabidopsis thaliana
gtcgagataaatttgcaatacttttaaaatctttgtcaccaaatttggcctacacccataaatatatggcacatcctgttaaaattgatacacttaaagaagatctttatcaaatttgtttttttttcaattagtttcgttctcactctttttaaagttcttcagagataaggagaatgtatacctttaggcgttaagaatagtaaaagataatcatatgcaaaaatgaggttcgtcctttatagattaaaataataaaaagcggtcaagtgtatgatgattgggtttttaaaagcattaataaattgctatatatgaaacatgggaagttaaatagctgggataaacttgataagctcatgagtcatttagttgaatagcggaaaatttgacaatactcaagtattgtaaccgcaaacgaaaagacaaaaagaagaagcaatcaagtttttaactcaactataaaaaatttgtagaaagtaaaactggctccgaaaccatattattcatgaaatgttcaacaatacgagtaaccattgagaatgtgatctgcaaattgaacttgagggggatttaaattcgaagtttggttctagaagacattctcacgtttgagagaagctatatgaattttcctacatgtgctggccattggcatctattttgtagaggaactttttcatttaagtttttgttaaaaacttttcccacatcggaaagttgaatagcaatttgtttctatattttgtgtgaaaaaggaaaactttgtctaggacattgcaagaaatcttgttttctagagacctaattgaagttaaaaaaaaaaaaatcttatgaaaaaaatctctatacactcctacttatatagttcatatttctataataaaaaaaaaaattatgatttctttgtccctgaataaaaaacgaactcctgaagtattgtagctagtagctaattccgtatagaattactcaagtataattaaagagagttttttcatcgccagcagctattccgtattgtagctttattagtagtctgaaaaatacaccaacaatttatttataaagaccgtacgtcaatgagctgaacaaaaaaggaaaggggagtttctaaattgtaatgtagtgggaatgttaaatcgcctggtgaagaaaagtgatataattattgatattggttgccataataacgaactaaaagtgaacgaattgggcaaaggtcatatgttgtaatgatgttggtgagtgatatttcagttatgttcatcattggtaagggttattaggaggttaaaaagaccatacatatgtcaaaagattcggaaaagaattccattttttcggaaaaaggtacttccatgattttgtttttcaggttagttatgaaacaatctgactttttcccatttattagacataagtgaattactgatcttttcaacatacattatagaattaaatgtttttgaaaacctttataaaaaaacccaagatcatatagatatatattttgattaaattatggtttcaggatttttttttcatttgtaaaatacaaaattttaatcttgatttttcatttgcaaaatacaaaattttaatcttgaattgtttgtataatattgaataaaaactaataaattgttattaaaagccaaaaagtatggaaataataacttaaaatttgaaaacaaaaaaaatagatgcaagtgtaaacacaacatttatatattttaaagaaatttaactatttaatcaatcctttgataatctggaaatcaaatagtaagataatattgacgaaaatagtgacaatattaaaactaactaacaccattttttctttaacttaagtagaaggagaaagaggtaaaagatggaacatggatgtaatgttttgaccatcactgctcgtgagaatttccaggctcgtaaacttcatctttgttcccgactggtgcactgctaccaaagattttaaaagtttgtgatgtaccgattctacaaattattataaaattttatttcatatttgtctttattcgtaaactactcgaaatgaaacaaaattttagttttgtttggttcatatgcaggttttatcatggctctgattcgtatgtcagaattatatatagcaaaataactaaataattgttaacaaaaaaaaaatatattaagtttcagttaaatacttataaaacgctaaaaaccgttatgttttttctaggcatatgtttaagatgtgagttgtataaattggcctcacttttaaaaaatgtgaaaacataaaaacctgatgaatattgtaaatggtaaaaaatagcggaataatatttttaaaacgtgaaaacctgaataagtagtatactattcattctatgtgattcaaactaagtcaaattctatttatcaaattaacttcagttttccactaactctattcatatttattaaaattaaatgagcctgcaataaataaagtagcaagcctagtaagaaaacggccaagcccaccaattcaaaaacaaaatcttaagctttaaactcttgatgatgaagatttaggaggcctcggctcgacggagactataggcggaatatatcatttggagaggatacatatttttaagtaaataacaaacttttagctttgataacatgccttctctaatatatattttgcttatttttctatcttgtgttgttccatatagggttctcccattcttaggtttagtagagtaggttctctacaacaagattctagcaaatcatctttgatggaacgaagtctcttggtcatctttgtttatatattttttctttttaaactcttagattaacatttttcatgaatttgcaaaacactcttgattttcagttgaagattaattttactaagtcaaacagaaataaaaataaaatctcaaataaaatacagaatctggctttaaatttattaataaaaatatattaatcaatttcttcaaaataataattatagaaaacatattaactagaaaaccaaaacttgatgaactaaaagataagacatatcagattcaacgattgtcattaagaaaatttattaaaaacgacaaagaaaacaaagataacattttggcattgacatcggcgttgatggatatgcgttattactggttgtgattataacagtggttctctaccatccaaggaaaacttgttttctcagcatatttcatcatctcgtcaatgaatccttgttggttctcataatgattttgatttggattgtaaacttcatcctgaaacacaatcaaataacaatattgatgtttctgttaacaatgagttaaactacatgaatattagtcaaattacaacttgagtgtatgtatatttcttggttgtgtttagaaaggaattgtttgcaaaaaaaaaactgtctctgatcccttttttaaagagataatacaattgtttagttagtttagaagagttgaagactagaatagatatcatttctgatttaaaattatagatgatgataaaaaaatacaaacctgatccataactgggatataaacttcttgattgttattaggtagaaaattactttcaagaaaatccacatgttctgctccttggtttgatgggattatggactgcaattatttggttagttgagaaaagtatactattagaaaactcaaatagattttgatgtaaaatatataaaatgattacaacatacaaacctgattcatatctggaatgcaaatgtcttgcccttcactgaaaaagagattacttgccagagaattctctaatctatggttttgagagactataagctgcaactcgttggttagctgaggagagttgaagagtggagaattcaaaaatgaggaggaactcccttcagcaataagaagtggtgtcatgccttcatctactacagttgttgccatgtttccagttgtagcggttggtgccatatccattaatgaagaagattctccgatttcaaaatttggattgttgagggttacatttttatgatgataaagatttctaagatagtgatcaataaacttacataagtcaagacgatcattatcattcataacaaaatctcccatgttcccaccaagacacttgaacatgacctcctttaagcaagtctccttattttctacaattaatttcttactttgcttttcgacttttgagatgtatagattgagaaattcttcgtggttcaccgatttaactttcttttgggtctccggtaacatctcaaatttcttgatgatattattcacctccgattttgatggccacacatctggatttgagttgaatggattgtagacgaccgcacatgcattaacatcgcataaaaccttgagatcattgagtttcttcagaaatccttctctcctctgcttgaacgatcttttcctcattctatcattgaaaatgtaagttagatttaacttttttcttgccatgactacactagatgatttttttgctatggtttacgtgtattatatttttttttactgtaaagcaaatgattatatagtaattaaagggtccacatatacgttgtcattttgctggctatttgactacaaattttaatactaagttaggataaatttcttacttaatacatcattcatgataaatattttatttaatatatactttatgataattattagcatattggtgagatgcaaagttttatttgttgaggttaagttcaaattatattttaaaattgtatatgttcacattagtatttacaatatggtgtgtctatttttttaattgtagatggaaggagtgatccaagatggggttaggaaaaataatcatccaccagttatcaaaaaaaaaaaaaaaaacagaatccgcaccactgaaggaacataatatggactgacaagcctcaacggctatggcttttgagtttgaaagggaacaatgtgatgattatacatgatagatagcccatgtggtggacttaatcttaagcccattttgacatttggtctgcttaaaccccgattaaactaaacgaaaggagaagaataaaaggttgtattacaagagctcatgccaagactcaagaaaaataaacatccataccacaaaaacaactctcggacaaagaggaaacagaaatgatacatgtttcttttgatatattgcccatcggaccatctcacaccattggaggatggttcatcaaatcatccgtaacaacgttcctatacgaaagcattgctgacatcaacaagttttgatctgactctcaagcgagtatgacatctccctgaaggtatcttctcacttcttcacattctcatatcgctaatgtcccagccatttcgatggaaagctccaactgtagacatatttggagtcaaaataattagttcatttaaacacaatcttaaatctaattatgtgggacaagtttatccacgtaagttataaagcttgaaaggaatcatgatttattaattaggtaaatattagactccgtagagatcgtagatagatttgagtctagacattttttttggacatgatttgagtctagagaatcttagaatatgtattagtatgactaaaaaaacttgtgattttaatttttttgtgaaagggcggcgtgaatcatggacttttctgtactttaatcatcttcgatcttctctttttttttctacccttttccaaacatatatgaacacttcaacttcacgcgcgactatgtacttttcgtgtacggttttttgttgttgaaaattatttttcatgattactattttgggattgattaaaaagcgatttcacacctctcttttttttttttttaacgataatagatttcaaactttagatataagatgcacacaacccatatggtgattcaattaacaaaacaaaggaagagttagtgtcgaattaaaggactgaagaaaaattgaaccaaacgcatctaatcaaaattaagtttccaatttttaatggaatccgggaaatatggtgcaagtcaaataatataaaataatgttataaactcgaaattatatgataagtttttgaaaatggcaatcactaatcttcaagacaaaacattgtagtataaattcatgtttttacactataatataaaatatttccaaaaaatcacaattatagtttgttcttagtttataggataaaaatacttctcagtttggatttaaatagtgtatatatattctaaattagcaacttttaaacactaagtcaaacagatattccctctgttcctttttgtttgattgtttagaaaaaaaaatttgtttctaaaagattgattttttaagttttccatgtaatattattggttaatattagtgaattgtaattttcaaaaaaaatagttaattattattggtttagagttatagaaaactgtaaaacactaaaaataatacatttataatcaacatttaatatatttttttaatatgtgtgttttttctaaacaattaaacaaaaaagaactagatggagtataatttaaacaagctggttgttgaatgatataattgaagattttgttttattatcactaaaagtattgttccgcacattcataagactttaaaccaaaaataaatcaataaaatcagccacatgaccaccatgttggttaatatatattgaaaaaacaaggcgtcgagccacttacacttatataaaattgtatatgacttccatgtccgttgataaaataaataaaacttgcttgtccaatttctatttcatagagtgaaaagttttggtagttggtactataggacatccttattgtagggaccgaccataaaaactttacatagagagatctaaagaaaaaatatttaatgcatatggtttgtcattatgtctacatacatttgtgaatggtatatataaaccagtattttaattattttctctttggttttaggcatggtttaaccatcttcatgtattattttttttgaatcaatgagaatgagcttatgtaatattttacttcttaattttgagaaaatttaattaaaatttgcattagttataatatggaacatatctaaatttggatatgtaaacccattaaagtatgaacacagaaaattcgtttcgattcactaagaattaaatcaacacctaaaacatacgagataacacgtaacgtaattttcatgcgtgatgttgaatgaagataatctatatcttcacgaggaaacacaaaaagaaaagttggaaaaaatagcgtttgagatgcatgcgtgagagtgtgcgagtggggaactggggataaagagaaaggttagataatagtaaaacactctagagcgtctgactcacgactatttttctgctcgtcgtttggtttggtatgcgatgacgtttgtgtgactcaatcgcaacttgccgtaccaaaagtcttgccgtacttcctcttcaattactaaaatacccatttcctaatataatcttatctttaaacaattgtaaactaccaaagatttctagactttaatttcggtccatagtttttatcgaccaagaatcaaaatcatagttgttttaagccacggttctgagcaagtaggttaatcctctttgccggtacaactcgaagatgggacatggtcgttgtttctctaagaaagatcgactagtacaactactaacaccatgtgttatctctttaatttcttagtttagttaccaccatatatttattaactccactttgaaatattaaatcatagttacttgttgacaatttttatttttttatattaattatgttgatagttagatgataacaatatttgtgttgtggcaaacgcagttgtattaccaataagacaataacaatggttggtaccaaaacagcatcacaaatttagcaataacctttgaatcaatcaattggggttttgctatgtttaatgagtttaaaatacttaaatacataactaattgataataactgtaacaacaaaaaaagaaccaattgataataaacgaaatataataatttatgtctcctacatatattgttgtagatatcttttaactttcatttaggagatttcataaaaacttactttttcagttgttaactttttttttttttttttttgttgttaaaaaacttctttatactaattagttaggatggttgataaacattgaattcgaatatgtgtttgttccctgcattatcggttgagctgatgttgtactcatttagccaaaacactaattaaaaatccatcatctagtgtatggttatagaagttttatcttaattaagtgcactaactcatgtccttatagattctgtttacatgtctgtctcgtttctaatcggttaaacatgatgattaataagcaatcaaaggaatagtcagtttttgttttattttttgctattttgtatataataacacgaaactattattgaacgtggaaggtcaacgaaaaggtgtttattcagcaagaggaaagggtaaaactagaatttcagctctccgtctcacaactaaagtcaatgcaaaaaagctaagctaagttttcgcttatataaacacgatcaaaactcattattcaacaaagtcttcgtttcatttttcatttttcatttctcaaccaaaaaaaaaaagagtgattttttttttaatcatcagtcaaatggaaaggggaagatcagatatggagatgataaacaacatggcaaattgcttgattcttctatcaaaggcccatcaaaacgacaccaaaagccgtgttttcgcgtgcaagacatgcaacaaagagttcccgtcgttccaagccttgggaggtcaccgagccagccaccggcgatccgcagcgcttgaaggccacgcacctccttctcctaagagagtcaaaccggtgaaacacgagtgtcccatatgtggtgctgagttcgcggtagggcaggccttaggtggtcacatgaggaagcatagaggtggatcaggaggaggaggtggccggagtttggcgccggctacagcgccggtgacgatgaagaaatcaggcggtggtaatggaaaaagagttttgtgtttggacttgaacttgacgcctttagagaacgaagatttgaagttggagcttgggaggtttattttctgatttttgttcgtttttctttttagggtatacttgtgtagggtaagtttattttttctgataatttctatttttgtagactttcagtattttttgtataacaactttacggtatataccgttatgtatagatacagatatatacatcttatattgttcgagttattatgtatatatatatatataaagtctgtttcagtaataatcattttgttgaattcttttagcgtcgcattgattacgtagacatatataatttgaattctgaaaacattagttttgaacttggatgataccacaaacaaatcatacacgttaggttcagattcttagtttcagtttttttgtattagaatcatgttccagagttattggttctataaactaatcggacatctttgtctataagtaggggtataagacctcttcgttttactatttgtctataattagacatctagttttttgtcattaacttgctaaaacttttggtaacgaaaaaaagaagaaagtcattaactagaaatttcgagatttcttttcgttgtagacgttttgttaaaaaaactaattagtattcaaaatttatattgaaagaaacaaaatttccacacaaaaaaaaaaacagttgaaatgagtcgttgatgataaacatttatgtgtacgaaagacatgataagaataagcaagtaatggtagtttagttttttttaatcatgtggatctttagaccagagattacagattatagtcatggttctagtcatttaggtaatctagccacttcataatccttgcagatttcaggtatttatgatggcaaagaatatatagctccaatatatttttgaatgattggaccaattggaaactcgattatattaatatagtttcctagagattaccatagagaaactaagttcaattgcataagcaatatcaatatagcaaacatcctagctagatatataggcgacaatagattggataaattgtatgaagcttataaggttcggatttacggcttctttaatagataaactaattttttcttcctatatcggtaatatcggagtggcaaaaagtttagtgttttccgtaaaaaaatataaacaaataacctgttatcatgtaaaatggagtattattagttaaaataacataataattttttttagaaacacgtgcaaaatccatgttatgaagttacaaatttgctaaatatttggtaacaaaaaaagaaagtcatatactataaatttcaagatttcttttcattttcgctatgactttttggttcaaaaagaagactgattagtataggagaaaagttatgtcacggtcatggagaacaaaagatccacataattaaaactaaatctcaattaaatgagtcgttggtgatcaaacatatgtgtaccgaaagacgtgataagaagaagcaaaagatgtagtttagtggttatagtcatgtagtttagtggttattgtcataagattgagtggtggattagtttaggcttctttgatgagaaagtagctataccattttgttgcatggttgaaccaattgggaaacaatattatattagattagtttccgagaagttttcctagagattggcctggtaatcgcatagaagtttttcaaacactaagagcttgaataggtttgacttgtgacagatgctatatagactaagtagcttgtggactacatcgtttttatgtttatcattcacgacataaattttagatatgtactatatatgcaagaaaaaaaaaatcttaagaaaaaaaaactaaaataaataaatatatatgaaatgcatcgtattgttgttcataccatataattttcaaatagattaagtaaagaagagaatcatgtaatcccaaacctaactttttcttaaagcccaaactgaaaaaaggacttataagttcgcaaagataagacctagtagaaagttatggaagcaattgataatgagatataacgataattctttgatgaatgcgtccggtccaatatagattttgaaactgaatagtcttcaaccgattttcagaaatatcattttcaccttaagtcactatgaaacaataatggtgccggtctcatctcaactaaattaatggttggaaacgattacctaaaatgtagacaattatctatttggtacgtagtcgtctcctttaagcttcttctttttcgtccaaacatgctttaattttgggaatccgtttagtgatttaattttagaaatcctatcaaattaactagatatgttttgatttgtgatgtatgagtttttgagctttcttggtgaagaagatggtaatgatgtatgatcgtttgtgtcattatctttttttgtttgttttataaataactaaataagtattagtttcgtcggctaaattagtcatacccaagagatcaagcttgtaaggtcaactgcttgttgattagtgattcatagaaattcacaacagcctccactggctagtattcaacaaatttaaaaaatcataaaacaaattatgaggtactaaacaaaaaaagcattataacataaatccaaaatttcccaaatgttggtagaaactagaaagtaaacttcactgagaagctatgaacttttgcctccatccacacgttgttcttttatactcgatatatgcttcatttacaaacaaaataagcttattacatgagttacatggaattcaatagaggaagtaaggactcttctgtccagagttcaattttaattataaataataaagtcatggtatttttagtaggtttcggtccaagattaacaagatggcttgctttttcaatgagtcatttcaccatagtattagtcagacttgtatgtgatgtgtcggatggttgtgtcgctatggatggtccttgcaaagcaatttgaattttgttctctccaatacgatgtcgacttagatcacttagtaagaaaagaaaaatctaatgatttgacaacatgcggtttgtttgttttttaatggacgagtaaacatgtccattgctcgtattcagcaattgttaaaatctagtctatgttcgaaagtttgttaccgacaatgagtatgcaatagaatttgaggttggcttttgtattatgaatcttcacactcatcttaagcttatatgatcggttctatatgtaataaacttatcttttgtttcggttccagtttcaattctttcaattcggttattttgtccggacctagtccgaatcctttaatctcggtttaatttataagcccaggtctaacgtgatccacgtcaccaacgatactgaacataactccacattagcaatccgatgccttctccaacataaaagaaaaacacttacttatcatcatctatcagccgtagattaagatatttagtatcctcaatctaacaaacacaaaatcaccacgtcatcaatccttgtcaaattctctcatccaatcaaatccattacttcctccttaatatctttcaccgcttcatcatcttcttcatcatcatcaatcacaaaaatccaaatcccaaaactttcccgagaaaactaaaaaaatggcaccaaaagccggaaagaaaccagcagagaaaaagcccgcagagaaagctccagcagaagaagagaaagtagccgaaaaagcaccagcagagaagaaaccaaaagccggaaaaaaactaccaaaagaagcagtcaccggaggagtcgagaagaagaagaaacgagtcaagaaaagcacagagacatacaagatctacatcttcaaggtgttgaaacaagttcatccagatattggaatctcaagtaaagctatggggattatgaacagttttatcaatgatatattcgagaaacttgcgcaagaagcttcaaaattagctaggtataataagaaacctacgattacttctagggagattcagacagctgttagactagtgttacctggtgaacttgctaagcatgctgtttctgaaggaactaaggctgttactaagtttactagctcttaggtttagccgtttaggtttcgaatcttggttcgttttgatatggaatctgatggtttttatgtaatttgttgaagattgtaatggtgttaatgttttctttttaatttggattttgtgtttagtgacttgggattctacaagaagtttgatatttatgaatgttaaattaaaatttggattttggtggatgattttgtacgatgaatcggtaattttgttgtgaattattcttgagcttagcttttgtttattcaccttagaaatgattgatcaactaatcatcgaacaggttataacggatgatgacgagtcttttatcagcttagagacaaatttctttcctgatttagttattttgacaataacttggtacacaaactattacttataggtttagtaaaatacatctacactgaggataatatggctggaatgtgttttttggtttcttgattccgtttttttttttttttggacttttgtgctagtgattcaatcaaacccttgtttatgctctggattatcgcatttcttttttatgtgtgattagagtattgcatcattttatatcttgaagaaagaggatcatgccaaaaccaaccttgcttttgacactaaatcaaacaaatcatcgaaccatttccatttgggtttacaatccagtaaccgattcacctttgcattgttccaaccctaaaatgttcattatctgacaatctcatattactaaaattaaataatttgagattcatacgtgtatttgcacacgggttcttctcttgggtcgtcacatgacgcgagttcttaattgattctgaaataataaattaagaagccattgtttcgaatcctataactgccttaacggtggatatttctctcttagttaggtgtttgttcattaaaacccggtcacaataattttaattaaatttgtattaactaagaaaatggtaaatccgtaattataaaaaaagttcatgaaaacgtgtaagagtcctctctcccactcttcttcgtcacattgtataatcccaaaactaactcaaaatctttttaacttcacacacacaaaactaaacacttctataattttgattctttcaatggaaccaattcttgaaaaaacctcaacacgttgggaagttcttgttcaaacagcaacatggacaattctcctaatgatcacagtggctttggcttcatttgctccggagatggcgtttgtgtcgaaattaaagtcatcttccgatgggttcgttaggattccgatggatttaccgggagaaatgttaatcttgccgtcagaaatggtgaagaattcatatttagacgtttttttaccaacgatattcgcaggagttatggtcattgcttctgtttctttattacgatcatgttttggtattgaaggtgttgtagaagaaatcgaagaacaatgttgatgacattttcgtcatatctatgggttatatgtatgtaattgatattaattaatcaataagggtccttagctcagtggtagagcaattgactgcagatcaataggtcaccggttcgaatccggtagggccctttcttttttgttttagaaactgttttcttgtttatattaaccgttcattttatttgatctgacggtgatgaatgtatcgttacaaatatgtgttggatcgatgacgtgtcattagatttcacaaaactctgaataattttcacaacaaattcttacactagggaatgcgaaaatgattttttgcaagaaatattataagccaattaagtgtatgaatcttatatataaagctaagaactttaaaacgctcacattgagtccatatttgtcattcgattcttatacctctaaactttaaattgctcacatttagtccttatttgtttttcaatcttcaaaaacatagttcaatcaattcctttgattagttttcgattgataatcctttaccatgaatttcagagattaaagagtaattagagcaaatggtacttatcattaatccattacaatgctgccctaattacaacacaaaacgaaaccctaaaattcaacccaatttctggaatttcttgatcgcaagacttaaatcatcatcattcaccagaaaacccagatctcaaattgatcaaccaccaaatccatatagagttcttccttgtctcttcaaggcataaacaacatccatagcagtcaccgtcttcctcctcgcatgctcagtgtaagtaacagcatctctaatcacattctccagaaaaatcttcaacacacctctcgtttcttcatagatcaatccactgattctcttcacacctcctctacgagcaagacgacgaatcgctggctttgtgattccttgaatgttgtctcttagaacctttctgtgtctctttgctcctcctttgcctaacccttttcctccttttcctcttcctgacatttttgtttttccagaaagttttaagatttgagttttctgatgagtagagaagaatttattttttatttataaagaagattgtttgggttagaaaatgaatcgtgaccgttcgttttattgtttgatcggacggtcaaagataacgatccgtgagaaaggtttatgagatatatggatccttgattattaatgaatcgacggttgtagattgggttattatgttagtcacggattgtggatttttgatttttccttttgaaccaagtgagtcaaccggaccggttatatgtactaaattacaatggatatcgaaaataattagtataactatggagtatattttacttttacttttcagctaccataaaaaaaggtaaattctcagatctctttttttactatccatatattttaaaaaatttaaaaattgtttttttacattattattatttggacaagttgaatgcacttggaaaaaaaaaaaaaacatattctactataagggtttgaatccaaatgtggtatagtggatatgttgaacataactccattgaattaatagaaacaattactgtgtactaaccgtaagaagagacgagactctatttttgttggaatgttctggtttgaagcatttttacaggacaacgtaaggatgtgtgctttagctagaatgaagcaatgtcgttgtaaggaggtgacgattattattctaactgaaaaccatattgttataaagcccttgagctccaaagctcttgtatatctagtctttttgttttctcctttttttctataactcaaaaactccactgatggtaaattacaaggtgttgttcttgctgaaatgtactaggatcatatcgatctcgaaaaactcgtaaaacgtgtgttcttgatttaatctccaaagtgaataccatgagtgtttgtcatagaattctcaacaagttgaagacttatctaaatcttgaagaatgaactcaaaatttctgttataagatttctttcaactacaaaatgatatgcaaaatattggtattagcttcataccataactagacgcacaaatcttgatgaaagaaacttgcagccaagaaattccttcatgaatcgcattcaacacaaagctcatcaaagatcaaaactctgctcttctccaatggttttttcttgcaaagtcaacttgttaaggtatatttggatcggtcctttaccaaaatgaaagaaaaaaactattccgctgccgggtttgaacccagatttcatcattgaaataaacatgtgtgctacagcggattggttgaaagtatctccaattaactagtatataccctgtctaattaatactctctacctatcacgtgttaagaccgaacacatattaagagaaagagaggagagccactagttttgtttaagtgttctcttaacaatgtgtgttcttgattcaatcttttaaaaaaatggtgtgagtgatatataatgtggttctttgattgtaccaattgacatatactagattcataaatcagaaactcaaacaaatactcagattaaacaccactattaactattatccgttaatttgacaaaagagttttgactatcccaattttcacaagatatatgactcattctgtcaactaagcacaaatcatcgtaataacatcttagtaacaacatgttagtcgtatttggaagagataagcactatcttgatggatttagttggtcccacactaaatccggaaattatacaattaaatccgggtattgggctgcgcgagatttgtctcgtcctacttgtgacctccctttttagggaccgagtgtttttgcacttcaggcacaagtatggaagctt

SEQ ID NO: 302 - DNA, 107097 bp, Arabidopsis thaliana
gaattcatatttagacgtttttttaccaacgatattcgcaggagttatggtcattgcttctgtttctttattacgatcatgttttggtattgaaggtgttgtagaagaaatcgaagaacaatgttgatgacattttcgtcatatctatgggttatatgtatgtaattgatattaattaatcaataagggtccttagctcagtggtagagcaattgactgcagatcaataggtcaccggttcgaatccggtagggccctttcttttttgttttagaaactgttttcttgtttatattaaccgttcattttatttgatctgacggtgatgaatgtatcgttacaaatatgtgttggatcgatgacgtgtcattagatttcacaaaactctgaataattttcacaacaaattcttacactagggaatgcgaaaatgattttttgcaagaaatattataagccaattaagtgtatgaatcttatatataaagctaagaactttaaaacgctcacattgagtccatatttgtcattcgattcttatacctctaaactttaaattgctcacatttagtccttatttgtttttcaatcttcaaaaacatagttcaatcaattcctttgattagttttcgattgataatcctttaccatgaatttcagagattaaagagtaattagagcaaatggtacttatcattaatccattacaatgctgccctaattacaacacaaaacgaaaccctaaaattcaacccaatttctggaatttcttgatcgcaagacttaaatcatcatcattcaccagaaaacccagatctcaaattgatcaaccaccaaatccatatagagttcttccttgtctcttcaaggcataaacaacatccatagcagtcaccgtcttcctcctcgcatgctcagtgtaagtaacagcatctctaatcacattctccagaaaaatcttcaacacacctctcgtttcttcatagatcaatccactgattctcttcacacctcctctacgagcaagacgacgaatcgctggctttgtgattccttgaatgttgtctcttagaacctttctgtgtctctttgctcctcctttgcctaacccttttcctccttttcctcttcctgacatttttgtttttccagaaagttttaagatttgagttttctgatgagtagagaagaatttattttttatttataaagaagattgtttgggttagaaaatgaatcgtgaccgttcgttttattgtttgatcggacggtcaaagataacgatccgtgagaaaggtttatgagatatatggatccttgattattaatgaatcgacggttgtagattgggttattatgttagtcacggattgtggatttttgatttttccttttgaaccaagtgagtcaaccggaccggttatatgtactaaattacaatggatatcgaaaataattagtataactatggagtatattttacttttacttttcagctaccataaaaaaaggtaaattctcagatctctttttttactatccatatattttaaaaaatttaaaaattgtttttttacattattattatttggacaagttgaatgcacttggaaaaaaaaaaaaaacatattctactataagggtttgaatccaaatgtggtatagtggatatgttgaacataactccattgaattaatagaaacaattactgtgtactaaccgtaagaagagacgagactctatttttgttggaatgttctggtttgaagcatttttacaggacaacgtaaggatgtgtgctttagctagaatgaagcaatgtcgttgtaaggaggtgacgattattattctaactgaaaaccatattgttataaagcccttgagctccaaagctcttgtatatctagtctttttgttttctcctttttttctataactcaaaaactccactgatggtaaattacaaggtgttgttcttgctgaaatgtactaggatcatatcgatctcgaaaaactcgtaaaacgtgtgttcttgatttaatctccaaagtgaataccatgagtgtttgtcatagaattctcaacaagttgaagacttatctaaatcttgaagaatgaactcaaaatttctgttataagatttctttcaactacaaaatgatatgcaaaatattggtattagcttcataccataactagacgcacaaatcttgatgaaagaaacttgcagccaagaaattccttcatgaatcgcattcaacacaaagctcatcaaagatcaaaactctgctcttctccaatggttttttcttgcaaagtcaacttgttaaggtatatttggatcggtcctttaccaaaatgaaagaaaaaaactattccgctgccgggtttgaacccagatttcatcattgaaataaacatgtgtgctacagcggattggttgaaagtatctccaattaactagtatataccctgtctaattaatactctctacctatcacgtgttaagaccgaacacatattaagagaaagagaggagagccactagttttgtttaagtgttctcttaacaatgtgtgttcttgattcaatcttttaaaaaaatggtgtgagtgatatataatgtggttctttgattgtaccaattgacatatactagattcataaatcagaaactcaaacaaatactcagattaaacaccactattaactattatccgttaatttgacaaaagagttttgactatcccaattttcacaagatatatgactcattctgtcaactaagcacaaatcatcgtaataacatcttagtaacaacatgttagtcgtatttggaagagataagcactatcttgatggatttagttggtcccacactaaatccggaaattatacaattaaatccgggtattgggctgcgcgagatttgtctcgtcctacttgtgacctccctttttagggaccgagtgtttttgcacttcaggcacaagtatggaagcttaaaactacgcgaaaccttatgcattttgcgtggcaatgtatcacggggtgtctagccacttgtcaaagacttgtctaccgacatattggcacagataaaggatgtcctcgttgcggagcggaagaggagactattaatcacatcctttttcattgtccgcattccagacagatttgggcattgtcacctattcccacttcagggcacctcttccctaggagctccctcttctataattttgattttctcttctggcggggcaaggaattcggaataggagaggatgttcttgaactctttccatggatactttggtatatatggaaaagtcgtaatcgatttttgttcgagaattttaaagaacctcctttggagactttggccttggtgatcaaagaggcaattgcctgaaaacaagcaaaccaaaaagaagtagccatcacagagtctatttcacttccggttctggcacatctccctccccctaggacttctgagtgtcagtttgatgcttcttggcatttggaggatactctgagtggacatggatggattttagttgatcaagatattactcttcatcttggcctcaaaagtacgaaaagaagtctatcaccgcttcatgcggaagtggactccttgctttgggctatgaagtgcatgatatcaattggcgagacctctggagcctttgcatctgattgctccgatttgatatctcttctcgataaccaagaagaatggccaacttttgcagcggaattggcctcttttcgatctcttattgttttttttccttcttttcgtattagatttattcctcgtagttttaacacttgagcagaccttttagccaaaaaagctaggactagaaatattcttttttcccatgtaagcaagtcggttcctgaatggctctccctagcggatagcgtctttccgataacttaataaaaatggtgtttgacggaaaaaaaaaaaaaaaaaaaggcactatcttgatattagcttcatactgtgactaaaagtacaattcttgaagcaacttggaacaatagatttcttcttgaatctccttcttagaaactctgcccctaatccaataatttcttcttagaaagtcaacttagacaagcataatcaattttataataaagactggtgtagatgttcaaatatcttgaatatgtccttaatttacctgactaaaagaattggaaaaaaaagtattccgctgccggggtttgaacccggatttcatgacattgaaattaaccgatgtgctacagcggatctgttgaatatatttccattcaattagtacatagactatagaaaaaataagtgtgttctaacaattaagacaagagactataattttgttgaagtgttctgctttgtagcatttaaagtgctttcaatgaagcgatgtcgttgtgaggtggtaacgattcttattctaactaaaaacagaattgttatgaggtcgttgagctaaaaagctcttgtatatcttctctttaggtctttttgctttgtcttttgttctataactcaaagactccaatgatagtgaattgcaaggtgttattcttgctgagatgtacatgatacggcatagatcttgaagaactcgcaataagttgaaaacctaaccaaactggaataaaaacaaagatgcacaagtcttaaagaatgaattgttttaagatttctttccactgcaaaatgataagcacaattttggtattagcttcataccatactcgaagcacaaatcttaaagaaacttgcagccaagaaattcctccatgaatctcattcatctcaaagatcaaaactctgctcctctccaatggttttttttcttacaaagtcaacttagacaagcataatcgattttaataaaagtataattgtggtgtattatagatttatttgtcagatgttgaattctttagatgtattttggatctgtcctttacctgactagatagaaagaaaacaaaaagtattccgctgccggggtttgaacccggatttcatcattgaaataaaccggtgtgctacagcggatctattgaatgtatccctcattaactagtgtatagactaaaaacaaattagttatgaatacctatcacatgttaagaccgatcacatatgaaagagaggagagccattagttttgttggagtgttctcttagtgttcttgattcttgaaaatacctatcactttgtattgataaattcagttcttgagaacaccaagcctgagacgaaaaacttcttccataaagaggaagcccttcacgtagcttcacctttggttcccaaccaagaacttctttagctttgcctcggatcatctggtatgttctccacaatctttatctccacgtccggtttaataagctgcaccaattctcaatacttatttgttaactataatcacgttcacaagaaattaacaacaacaaaaaaactataatcacgctcatgtgaaatgaaataaaaaatgacactgctaaccgctttaaccgtttcagcgagctcaacaattgagaattcacctggattgcctatgttgatcggtccggatttgtctcctgccatcagacgctttagaccttccatctacagaaccaaagttggactatgtatcattttataatatacatcgcaaaatggtatgaataatttctgcaatttgatccaaaaaagtttcttaccagtcaccacttttttaaggtggattccgtaaaatagagttttcattgttatcaatcaaaatttttgaataatgataaagataatgaatgacttcctaccgtaaaataggatggacatacataccatgtttactctcataccatgttcgtcatagaattgtcaaccagttgaaaaactgtcaaaacaaaaaccgtaattgggagagataagcgcaatcttgatattagtttcacaccgttactaaaagtacaaatcttgaagcaacttggaaccagtagatttcttcatgaatatcattcaatacaaagctcaatacagataaagaaaaatttgtccttctccaattgtttcttcttacatagtcaacttagacaagcgtaatcaattttattataaagaatgatgtagactgttcaaatattttgaatctgtcattgacctgactaaaagaaaagcattccgctgccggggtttgaacccggatttcaccattgaaattaaccgatgtgctacagcggatctattgatcatatctccatttaattagtatatgaactatagaaaaaattagtgtgttctaacaattcaagaagaggagagagttaaaatgttgtttagagacagaattgttataagtcctagtcttcttttttttttttaactcaaagactccactgatagtgaattgggaggtgttgttcttgctgaggtataacttggatcacattgatctcgaaaaactcataaaacatgtgctcttgattcaattttcatacaaatatcataggtattagtcataaaaattctcattaagttgaatacttatccacattggaatcaaaacaaagaagcacaaatcttgaagaatgaactcagaatttctgttttaggatttctttctcatgcaaaattataagcacaatcttggtattagcttcataccgtacctagacgcacaaatcttgaaaaaaacttgcagccaagaaattccttcatgaatctcaaaactctgcccttctccaatggcttttttggaaccatgtcaacttagacaagcataaattttaatatattaaaaataatggtattttgtaggtttatttggtcagatattgaattgtttagttgtacgtattggatctgtcttttacctgactagaaagaaataacacaaaagagtattccgaaaaactgtgtgctacagcggattagttgaatgtatcttcgatcaactagtatatagtctataaacaaaattagtagtttctaccaatcacgttttaagaccaatcgcatattaggagaaagagaggcttcaaccttgagcttaagaagaagagagactctagtttgttggactgttctcttaacaatgtctcttcttggttcattctttaaaccagtggtgtgagagataatgaggtagagtacaaactgacataaactagattgttaaatcagaaactctataaaccaaaaaactcgaaaatccggattgacacactattagtttttattcgtttgatgtttcaaatgaattcgatcatttgggtacaatacaaggaaaacaatttggacttttccacatttcacaagatcagtgaaaatgaaacgactcattttgtcgactactaagcttaaaacatctcactgattacattcataataaaattcaagtagtaacgtaacatcacttccctaaaatgttcctcgttaggacgcttatttcctacaaactcaaaatgcaaagagaaagattaaaagacatgctccacatgttccggggatatgtgtgcacttgcttcgacttggaaccccgatttcaaacaaacaaacaaaatgataagaccacacaattccatgaaattaaaatagcaattatttttcttcttcttttttttggaaaataagttttacttcttcggaacaccaagccttagacgaaaatcttcttccataagaggaagcccctcacgtagcttcacctttggttcccaaccaagaacttctttagctttgcttatgtctggtttcctctgccttggatcatcaggtgtgttctctaccatctttatctccacgtccggtttaataagctgcatcaattctcattatatacgacattacttatttgttacacatttatgtgaaatgaaataacaaaaatgttaacctctttaaccgtctcagcgagctcaaccatcgtgaattcgcctggattgcctatgtttatcggtccggtttggtctccttccatcaaacgcattagaccttccacctacaaaaccaaagttaaaatcatttctgaaatttgatccgcatgtttttaccaatcagactttttctttgtgaaatcacatttttcgttcttctattttccgcgattccataagatcaatgctagtgagattgtctaaccatcattccatggggtttcaaatttatttctcttttattaccattctgttctacattgttattttcgtaaagataatgagttgcttgctgctatatatgatggacacacataccatgtccgaaacataacagaaactgcgggtttgtgttcccggtttctgaacagtcagagcttctcccctgcaaacccaaaacaattttatcaaacaaaaaggctttagaattagtctaggattcgactcaaaattactcggctattttttcaagaaaaaaaaaaaaaaaaaagataaattcaagaacttgatggagattagtttcacctgagagcctgagcaatgaagttgctcacaacgcgaccatcatcaatgttcatacgaggaccatatgtgttgaatatcctcgctatgcgtatctctacaatggccagacaatagaagtaataactaatcagccaataagcttaaatcaaagttttcaagaaaatggtaaaagagtgattaattttaccaatcccatgttgcctatggtaatcaaacataagagtctcggcaacacgttttccttcatcataacagcttctaacaccttataatgtgccaccagcaaattcattttgtgttagttcataaattgataaactgagattattacaaataatagtcatataatgacttaccgatcgggtttacatttccccaatagctctcggtttgagggtgaaccaaaggatcaccatacacttcagatgtggaagtaagtaaaattcttgctccaactcgcttagctagtcctaacatgttaagtgtgccaatcacatttgtttttatcgtctgccattagaaagatgaaaaggatatatgatcataagtcataaaaatatatcagctagcattttgcgagttttgattaacgaagtttaacaaaccttaacggggttgtatttgtagaaaattggagaagcgggacatgctaaatggtagatttgatcaacctcgacgaaaagaggttcagtcacatctgaaaaaatcacaagaatgagtattaatgcattgttttggttaatgagtattaagtaagtttgattaattaagaagatactataccatgacgaattagctcaaatcttggatgaccaatccatttcttgagattgtcttttgatcctgtgaagtaattatccgcaacgattacttcattcttttcgttttgcatcaatttatcaacgagatgtgaaccaatgaatccagctcctccggtcaccaagatcctcatattcgactgtattttcaaaatcattcaacaaatcaatttctaccactacatggatcatagtgatttgtgttagtatagttgttgcatcaccacgggtaatgaatgttgttgtcggaaaaaaaaacaagttttcaactatcaaagccttaaaggtgagattggatctatagagtttcaactttttcacttatgacattgacttaagcataactacactttaaactagagtaaatactaaaaactttcattgcatttagaactcaattgaacaaaaagtttaaagagtattttgacttcaaaaaacagaactaacctgaaaaaacttggaattacgcagaggagacggcataggtggtggctttgtcgtcgtcgtcccgttagaagaattagacgccatttctacaattttgaatcaaatttaataaactctaatcacagattcatcatgagatttagaaaaccaaaaacagaataatacacatgcatttacatacacaatcacactgattagagtatcaatcaacctgatgatctaagaaacttgatgaaaaataaaaattgtcttctgatcttgatgacattaagagattcactggaatcaatatttatacgcatgtaaatttaaataaatcatatgaaacatgaagatagtcccacaaaatttgttaactaagccacaccaaaaaaaaaaaaaaaaatccctaccagaaaaaatgaagcttcaaatgaacgaaaagtgagactacgaaatgcaccaaacccaattttaagttggtcaccaaacgtcgcttatgaataaagtttcaataaagaaaatgagaacgtttttatatcaagaaagagagatgacaaaaaataaagaaagaaagataagagaaaacaaagactaagagagtttgactttagactattctcgacatttaagaattaagactgaggaaggaagatggaataataaattatgggttttaaggattttatagatcttaaatttcgagatttgcgcgactcgattaacttaaacttgagtattaataaaaagaaaaagaaaagcttagagtattacatattgacgggagttagatattcgccgtaggaatcgaaccgttgacttgatattgcgctaaacgaatatcgcaccattttcataatttcattcgcaatttgtcgagaatatgatttttctttgatttcagtgtttatttgttccaagaaaaatataaaactaaaagagatttttttttattttaacttgaaatagaaaaggtgcgagattttgctatctgactaacttttaaaaatgagtgtaaacatcgaataaaaaaaaaaaatgacattcatttcagaatattaggaaaaaaaaaacataaacttttcgaaatagcttagtatataaagaaattagatatgaaaaaaaaactataaaaaatagagtattaaagtcttaaagttgtcgttgaccaatacgaattaaataaagcaatcaagcgaaatcaaacataaaagtggctgtagtttagtggttagaatcccacgttgtggccgtggggacctgggctcgaatcccagcagccacacttttttttttctctaaacttgttatattattttaacatttgaataagaggccaacgaattactcaaagagtcccaacatttattatttactaattttctatgcactttttagactcttcagtcttcacataattggtattggtattattggtatataaaccggttaaccacaaagccttattacaggaacaaaaaaaaaaagagatgataaaccaaaaaaacaaacgttttcgtctttcacacgccatttgttgtttatcaatggtaaaatattatcatttatacaaagaacgtattttgcaagagatctcatgcaagttaacatggcttgaaggattttccgattgcacaacctctttaaccatctcctcaatctctcttgtctctttcccaattctctccacacaaaaccctaatgcacacaaactcaacacaacctcactcttgtccacttcaacctcttcttctccatcttcttccacacggaatagtccatccgccacgcttctgcaatgctggagatacgtttctaaaatcttctccggctcgctcacggcggttgagaagctagggttcggtgtcttcccgagctcaatgtcccatgaggtgttgtcgctcttggcgagcgccttttcgagtgcgtctagtgattttagaagtgtgatttcctcgaatgatttggctaaaagacctatgctttctgttagactcttgagatctttgtctacgttgcttagaatctccttacactgcggtgattttgtttttccttgttctccaagaaagcctatggcgtaaccgctgaattgcaatagatcagccattttagacaatgacttgaacagcttttcgtagcaagaaaagttgaaaggcgaaaaccagaaacttggctctgcatgggcttctgctgtgaacttcttgagctcatttaaatgacttctcaacttcttttgactttccattatatctgctttactcgctttagctccaaacaagcttgcacactcgtacaaagcgtggaagcttctagagagctcaagttttgctatgttagcggctcttgtaggctgaaagacaagctccaccatgatcgaacaagacaacccaataaaagtctcgataattctctcgatcgcgaactcgcttggtggcccgaaattctttcttccgagaatcaaaacggcccctatggccgctgatatccctccggcttgcccgtacatcttgctcctgcttaagaagctagagaagagaaaccatggaagcaaagaaagaaaccgaaccgtcaaaaacttctgaaacacaaaacagcccatcactccatacactgtccctatcactgtcccttgtgccttcacattcgtcactttaaacgtcgcctctctggccgctgcgaagctgactgctacgggtaaaccagcccaataaccgtttggcttactaaacatcgaacctagcaaaatcgctaagcctaatgagagtgatagctttagcgccggcataattttcttgctgtcccaatcacttatccaagacctcgtcttgaatttgttttctaagaccttgactttgttctcctccggtttagctattatgatggtttcaaggagcctgatgcagaacaagaagaagtaaaagggcaaatcttgaggcgttcccgggatttcctgaagtgtttggaggcactcatcggggtttttcggatcagattctggtgttactgacggttgcgaactattattcactcttttaattgagagaatcacacgttcttgtatattcttgagatcttcttttacttcacccgcaagtaagctcgaaggaataggagatttgcttgctactaccatttccattcctctaagagcaatttccatgctttgtagtttctctcctttgttatcattcacgttttgccacctccatatcttaaatggaagcctctcccatgtcatgcttggctatatacacataaacatttcactattagaaatatgtattgtacatacatttatattcttttcttgtaaacagatattgtatttaataatgagaatcaagtatattacttggtaacgtttgagtgtttgataaagcttggaggaagaacgagccaacactcgagcctgtgagactgaagccgttgctgacatgctatcatcggagcaaaaagccttcatatacaacttcactctcgttgttacattttgaccaagctctttgcagctttgtttcacctatatatttaaaaataaattattagttttctattttatttttcttaatattatcatagaatcccatgccattgctaataggttgatttaatactgtcaaagaagaagtatataatcttatagggattatgttaattaatcaaaagggaatcatattttgtctgtgatgcgacacagtttgttcgcaatattgggaagaattaagacaaaattttcggtggttgctgacataagtaggattttatatgtaataatgtggtacggaataaagttagcaacacactttaatacccacgtcaacgtgttttgtgactgtattaccaagtccaccaacatgtttgttcctcaaatctatttctaacacgtatatatatgtacaatggtttatcaaaaaaaaaatatatatgtactatgtctcgaaaatctttaaatttttaaccaacctaatcattcctcttttaatggaaaaaccatctcaaatgatgtaacattattctaaatcgtgaaaattctaaatatagctacttttgttttcacatgcaaaaatacaaacacttaagttagtgtttgaaacaataaagaccgtacttctacgactaagtacgtagagagtaacgttacatatacgtaaataattcaagttgggataatttgatatattgagagtgatgagaaaaagggtacctcgcaagtagccaagcgaggtagtgggacgagtagtgcaagaacgcaagctacaacaccaagcgcggtgctagccgcgacttgaagagggtgcataactggatcagtcttagctcctttgatataaccaataacatatataagaacgatttgtcctaacgcgattctcttagccaccaagtgagtcgaactgttaggcagcactaccacaaacgccgctagagccgccgccagagccgtggtttcggctgtcagacgagctggtcttataagctttaacgtgacgatcgcaggtcccacgctctgacacgtggcgtaaagagctaaccagcagccacgtagcgtgtctccgagtgtagcatccgtgatgatgaggataaccgtgacgtaagagaaggccgggaatgccacgtggcggttgatccattctggaccgtatagtgtagctgaaccaacgattgtgcaggctagagctgttcggaacgctgaggctaggcacgtgcgccacatggctcggcctctctccgtcattagcattatatatagagagagacagccaaagacaactttgaagtgaaataaaagcttagacttgggagctagtttgttgttgtgttgtgtaagaatctaatgatttgaggtgaaataatggaaataagaagaatatggaataatttgaaagaagtgtgtgacgatgaaggggcttataaagatgcgttgatttgatgagtgggtcagtgatataaggacgacgtggaagtacaccaagtgggttccacgtgaggaaattaatggattattatgtaatgaaaatcaaattttatcttttaatcaatggattgtttagttgatacggcatagtggctatatagtaatgatcatatttggtgcctatttatgtatatatgtgttcctggcctctactgatctatacggctggaacatattaaaaaggaccaagagttttatagtatttgacacaaagcggtctttaatcacgttttcaacaaataaaatgaaaaagattgtatccgtatctaatgaggaattcaagtatcattattggagttcaaataagagtttgatctacgtgtgtgtgctttgaccaactaatatagatggtgtaatattcttgtagtgaattttataaaagtattgtgtggtagaaaaatcagacatagagttaatatagatggtgatacaataaaaaaaatatggttgaataacgatttcaattgatgttatattttgaaagtgaataatattgtagtaaactcataaatttattttcaaaaacaatttaaaaatatatccatatagttgaaaattattagggaatagtttatttatgattgaacattaaagtgaaaatagtttacagtgtagcaaagcgggaaaattgattatttcgtatatgctttttattatgaagaagataataaatccgtatatttaaaaaggtttaggcttagactatgtaatttgattaaatccctttcaattctagaatcgaatctatcacttccgacattcgtagttttgagttcggttctaccggtctcgtagcttttgtgtcaaagagtatcgtagcagatctccaacagttgtcggtttctatatctctttttccgggtgttccggtctgagatccccgcttttccatctcgtttttttagaggacgtcaacgattagttttttcttttgtgcgttttctgtctatgtgaacttctgaatcgttcatctagctacataataaggtccaagtctaagttaaattcatgatttggttctgaagaaaagaaaactgtcacttagttggtttgattgtgtgtagtagcttgtagttcaactagttcttcagtaatgttgtagcaatattattttacaaaaaaaaatgttgcaccgatataataaattgcagtttgtttctgctttaaccttattttctagatttgaatttgtttggattagatatttgaatttagtttttgtattttcgttttgtattcttgttagtatactagcaagactttaacaaaaaaaaaaaagtatactagcaagatgtgtattttacggactaagcaatttagattatgaaattcctttaaataaaacccgtgaattaaaaaaagagaatttcccaaatctcaatatattgttttagcatatttactttatgtttttaaatttttttatattatatagtgttactattatgttaatgttgcattatatatatatatatcctatattttatagaaaatacaattaaataatatattttattttacaatattttttggttggactattattttaaaaaatatcactagtttctgctagtttatttattcgagaatataaattattttcaccagttgtgtttttcaccagttgtatttagatgacaaacagaaattcttaagaacacaagactcaccgactcaaaactataaaaggacaaagactttccagaaacaagaattgccgactcaagatcatataatatcaaaattgatcagttatgaatattgttcagcacatgcatgcaacagcagacatcagtctttggagatcacttaacacacgtggaaaattctcatgcaaaactaaagttagcatcaaattttattttgtatacatagggcaataaaaatcttgtagaaggcaaataagattttttctttgtatgttgaaaagcaaatacgcgatatcttattatactaattccaaagtttatctgtttaattttcatactcttttttcttttcccgttgtaaaaagagtatgaaacttgatgaacagagaaattttggaaacaaagatatcttaatctcttttgtaatggatctatacagcttatataacattctttatctttagtatcaatctagtttaatgtaatagacgcattattttgtagatattataagttacacttattcaaatttatcaaataggtaaattcgtaactcggaagtatgcaaagttatcttatggcattattatcttcgtcccgacaagataaattaacaattcacataagagagaaaatcgccgtttacacaattcaattaaaaaaaaatgaataaaaccaaacttcaagaaaacaagagaaaggtataaacctgagaaagataaagcaacttcagattcaaatccgtacagctgttggttgtttcacaccaagtttcaactacaccttttggaaaggaaaatttgcacattctatgcaaatcacatcttttactttttactttagaaagaaacaaaactaatttctttgctatctactactcccgtacagcttttatctcttaaattaacactaatccaaactatataaacaatattaaaaatttaagtgtttatgagataaaatacttaatgtttaaaattttactcaagatctaaacgatattaattgatttaagtgtttatgagataaaatactatacaaaatattatgataattaacaaaatattcaaaattttaaaatacatttaaattaaaactatatcgaaaaattgaaattaatatcatagatattaaaattaaagctttaaaataactatcataaatgagttttgacaaaaatatccattcgaaaaagtcaagcatgttatattttgagaagaagaatttgtttttagtgattttccaacaacaataaattataaacgatctaattattgataatattagaactcaacatcaagccaacaatcataccattttcatttatatcaaagaacatatgataacttaaataactacgtatttatgaaatcaaaacttataatttacttctatataattataagaaaaaaaatctcacacttaagcaaacacaaaaaatatcaaataaatctatatcaccgcttattctgcttaacataaaaaaaaaaaatatatattcaactgaaatgcttttatttatttattgaaaagaggtttacgattgaaatgttgagaagataattgccacaattgtttaacggctacgtggccgtctagaccatttttaaaacaatgtttttaattttaattagactattttctagcgtaattcaataagaacaattttgagttaattttttttttttttttgccaactccaattttgagttaataagcggcgaaactaaccgtaaagagagccgaccactctctaaacgcgtgcatgttgagctttagccgccttcaaatctctaaccaaatctctctttttccattaaatattaaactttagttctcaccattatcctctacgtttactcctctaatttgttaatattactttcttataccacacattatactaatatactaaataactaatttcaactttctatcatgcggctaaaactaaagaaggagaaagctaacctaacattgttttctttttaaattaaagacaaattaggattataaatttgaagaacagtaaagttgcatggtgtgtgatgaaccatgcaactatataatgattttggttcaccaacggtttcaacatttcaatttgtaatatcgttcacatacatttatttagttactatttcctatttaaaagaaatcatattctttttttcttggaataacagagaaatcgaatgatatacaaaatgtaatgaatagtataatatatagatatgtagctgatatcagtaatataattataataatatctagaaattccaaaaccctttactctattcacaaagtggatttcctctagatttccacttacattatgcttggtcctaattgtactgaaatttacttaagatatatatatatttttttttcttttttttttgtgttccttgagaaggaggaagggtcaagtgggacgttgcgaatccttctaagaaatttggttagtgcatttagttagttaaagctaaccattctataatcttcttttctgtcaattaaaaatatataagaaatcagaataaccacatatctctttcagtttttagtttggaaattattttaagattgttaattatcaaagtcggtttcattttactttcttaaaaccatgcatgcattatacatagattatacacacgttattatctgatgttggactcgcattttattcaaacatacaatagacttatatttacggtaaatatttttcccgagtgaatatgacccgcaaattcatattaaatgtattcacacaaaaaaataatagttaactatttcttatagatatatacttctcatgtcctaaatttgatggcgtaatcaaagttcatgataccgacaaacaatgttcagagtgctcacaatgcttatgacgatgttcgtttacgtgacaaccccactcaactgaaggtcactaattaagttgctaacgttcatcattaaatgcttaaatttccaatagtggctccaaaaggtaaagaaaaaacgtttcaggtgaggcaaacatctcactctaacgcaaaatgtgaacaaagtttttgttttgaatattatttttgttgaaaatgtctatttccaaaatactctaatgaaaatgtgcacaatactctaatgaaaatgtgcatatttttgtaaaagcctctaatcatttttttttttgggtttgggtcagcatttcaaaaattgaatggacgtacgtcaagtaaaacaaatttgtattcatttgttttacttgttatataataaatggttagctgttggagatatatgtttatttgaatatggtcttgcaggtgagaaaattctaccatttccattttgttcataatcgtttttaggaacctattttgccctcagagtctgattttcaagaggggtagtcaattaaacaagatttcacctgattttgttttgttcgtacagtaatacaatcaatacgcgttcacaatatatgcatgaactcttaagtcatgtaaatcagtggtatattcatttagtcatttatcttttagttgtcttttgattaatgtgtttactagcattatgccccctgctatgcagggagaaaattacatattagttacaatgtataaatgatttgaaccattaatagcaaaaaaacaaatgtagactttggactataggtgaagtcgaaacaaagactatcaatccaaactaaattcataaatttcaattaaccaagaatttaaaacctctaaaaaatcacagatatttaggtaagcctaaaaattctcaaagtgggatgatattttcgtgatccaaacaaaaaaagagattgaacttttcagttaaatatttttgtacagaggaatgaaagaagattaaaaaaaaaatcaatcattttctccagttcatgtgattagcagtaaatgaaattaccaaagatcttttctgtgtaaaattgattaatcgaatttgttataataagataaagagattgtggtcgtttatagtcaacatggagtactatgaagtagtggagcaaataacggaggataaaaatcgtatgtttaggaatcaaaatcatagagatattacatattagggaagtagattgtgcagattagggaagtagatgtcccatgtgatgttttctgagaatatatgagctcgagaaaaagttggttttctccagtgtataccactaccagtatatctagtgcttgtacggcttggtttcctttcttactgaaattcacaaaagcaaagagtcaattatcaagtacttgattgcgtttaaaaaattatgagatcaactattttataaaagcaaaggaagaactaattgagaattgataatcttggcatgtctttgggttggtcacgatggtgtaagagttttctttttctgaaaatgtatcacacgggaccctgaaaacgaaacccatgtctttctataggtagtttctcaacaaaaaatgattagatgagaattgtaataactcacaaagtataaaacaaaataatgttaaaaactgaaaccggaacagaaaagacatgcaaatctcgagaatatgaaaattgatacattgattggaattataatcattctgttcttcagccacaattgacatagaaggagaaaggagagtgaagatgaattatagttcgagaaaggaaagcggaaacaaatactgtaaaaattgtaaatctgccatggcgtagagaaagtaactgatccaaaagcgaaaaatttgagaatcgtaataagaaaattcgcaaagaaaactaaacaatttaaataagcaagaacggttgcaaaacatgaggaagatcgtgaagaaaacggcgagaaaaaagggaagagatttaggattaatatttctttttaattttaatgagacaatagttattgttttatgtttcaaaacacaataaattgtgactttgcttacgtgtcagcaggagaatgttgcagtttttgatatagtgactgttgatttagtagatatagatgtgtagctgcgatttgagtaagttagagacttgagttgctgggagcagaaacaggaccacttattccggcgaatacaaggccaacttctttgtggcttttcatcggaatacatatctattagagttcattttttccatttttttttctcttctctaactgcttcacaataaatcaaatacatatctatcaattgattgtaagagcacctccattagtcaagaaactattggatttctcaaacattttctattaatattttatataattttattattttcttaaatttgtattgttttaaaaagttaagttaaaccactaataaaatggcatatatgagaaatcatacatataacaatttctcatttatctctctcttcaatcttttttattaatatatattgttagtatactcatctccatcccaccaatgaaggtgctataaacatatcaatcttatatgtagaagaagttgcatacaagaatacaggcggggatgtattaagttacggattcagaaatgttttggacaatgtaccaaaaaatatataacaaatgtttcaatggagcataaaaccatttacctcatgtagaattgggttcatttcataccactatgcccctttatagctatcagcctatcaccatgtaaaaggtaatttatttatattttacctggtgtcaacaacactatatccaccaacatgggtccgccactagataattgggcaatattagttgttgttttctgttgagtaaaaagatttatttctttggctatatgaatatagagtttgtagtgtggaaaatcgacacaaaaaagatttgagggtatttgtgaaagacaacattgaacaacatataatggaactatggaagcaaatactgcatcagcacaatttggtaaacactgctttcgaaagcacccatcaaattgcaaatgtaaagaaagtaagggaatggtaggagcagtcaatgaacacagtgatagcacgtttaaattctactccactagtcgataatgttatttctggctgagcattaattatattgatcgatgtaattgactcctccaatttttttttttatcaagaaaagtaaaagctcacgtaaacgcaacatatttgctgcacaacacgaatgttttttgttagtgcaaaatgtgctatggacctgctcggtttaatttggcatcatagaatgtattttctgaacgtaaatgaattagaagcaaacaaacattgtgacatttcgacaagttaaaaaatatttcagattgagaacggagaagtgagttttgtaaaagttaaatagacttataactatggataacgccaagttagttgatactgtgatattagtgagagcctatcaaattgcttgcatcacagctcagtgccatatatctattccgacttcgaaaggtcagcttacgtctcaccgcatcctattataaaatattatttttttatttttttcgtcattataaaatattaaataaaataagtggaatccttctaataaattatagtaataaataaatagaaattaattatttaaaatgatgctcaaatgtttttgtggaccaattgcatgcgatcgttcgtctttttggacatcaggaaacaagaagaccgtatgacgtacttcacggtccgcacaacacacaccacttatttccactttattatctctacgctcttccatttctttgttttattttgttaggtcaaatgctcgagatcttaaaacttcgtattaaattattataatttgtcttttaacaaaaaataataatataacttttaactattctcttaatagtattttatggaacaccaatctttacctaaaagaacttaacacatacaaatctctttacagaattttcacgtttgttagaagagacacgatatatagcaaacttttgaaatattaaaaataatcgtccctttattagatgtacttgtgttcctgattcaatgagaataaaatttactaaaatgaggtaattaggttaaagatatcaataacttgagttagttttagtttttttttgttatttattagctaacgagaacatttaagataaatcatattttgaaaatataaacgtaagtttctgtttgcttccaatttttttttttttttttaaattgcgcttcaatttcggttccgatttcgactccaaagtggaaatgataatcttcggtacaacttagattacatgtttaattaatatatattgacaaaattagtaattatagattaactactattggggatgtcttttcaggttaggtaaagatagaacctccagataacaagaattagaaaaaaaaaaaaaaaaaaattaagataaaaccaaagaccatacacgtaatcatttataaacttttataataaaaaaaacattagaaagtaagtattaaccaaaatgtatactttttgttgcaatttgagtagaaactctcaattggattacaccaaaaggagcaattagaccagttgtgtgcgaaacaaaacaaaaattcctaaatggacaacagcttaactaaaagatatgtaaatatatataaatgagaaacgaggaaataaattttatattacattaggagacaattttaatttgtagagtagtttaaatgggacagaagagtttgagacgtcaaaagcttcatgtttttaaagtagtttgacctatacgatgccccctatctggaaaactaattcatccttttctctgcatgcaacttgtggcaaaacaaattatgattaatttcggtttattcttggtttggttaaccgggtggtgctaaatcacacaccaacaatcaatatagccaagaaaaaaactattacaagagatcaccaacaaaattataatgttaggacttgaagctgaactgccaacaacaccacttcttgccaaaaacgctagtacatataagctcaataatctaaattcacctcaggaatcagattgctcaagttttggatgtataccttgagttaagagagaaattcgaatccagccaagattggaaaggataactctattctctgtttagtttctttgcaatttttggaaaagatctagggtttgatagttttgttttgtttttgacatgtcgtgaatgtgcaaggccacattaatttttagattgccttaagccttcattgaccttggcacggcacttacctccttgtcgtctcttttcttttcgatccgtgccatttctttgtcatttaaattggatactctagtagtataaacttgattttaagtaaactagaacagtacattctctacaaaaaatatttgaagaagacagacagatatgcgaacgcctaaaacttctgtatatctgctgtgttagctgtctaattttttctcttgcaacggatattcgtcatattaaacgagaatgtaattgctcacgtatccttatccacatatttcatagcccaaggcccaagccaacacaaatcattttgttttaagcccacacagttctttgaccataaataaaccacacaaccacgaaatcgggagtccaattgatacttgaacaccgaaagtgaagttcacataatcaatcacttgtatataaagcttcctttttggtcaactaattactatactgagagtactcaagaaatcaaaatggtccagaataaatacttttgttatctcgccaacaaaactcttaacaattacttttgagttaattagtttggattttatctcaggatatccaacttttgtaaaagaagtgttaatacttaaatttctctcgcacacaaaaaagaaatgagaatctttcacgtgaagatgcagcttttttcgtattgagtgtgtttcattccatgcctaaagaagtcttgtgatatatgatttacaccaataattttttctttattggatttttcttttctctgtaagttcaatatagccactgtacaattcagatttttgtctttttttttttaataagtttttgttaagcgaaaagttaaatatatttactaccgatatactacttgattagtggttcacattatacattaaaaaatgtggaaactcgtgatataaaatatcttaccgacaaatacaaaataaaaaggtgtaagaacaaaacactgtctaagcctgcaagcctcgaataaaaacaatgtaccttttttttaatatcgagtaaaaaccgtgaatatcaactgaaaacaaatcattctttcaaaatggttattcttgaaccaaaattttttaaattgttaccattccaattataacttctctatcaatgtttaagcattacagaatcgaaataaaaaaagagaattaaagagagcaatttcaagataatacataatttcatagttggactacataactgaaccgggaaatcgcatactaaaccaatcaaaatcagactaaccaaacaaaagcattagaagatcagtccgatgttacgacaataaccctagaacatggccgaaacattagtggcagaagatgactttgagctctctaggagaagcacagtcatgcataagcgaaggactatcatgagcaaaagtgaaactcgaaggacacgcatgcttaaagaacagcgaatggctcgaagctttacacgtgttagggctattgtaatgaccacgacaacacagctcgtctgtatggaaagcctcacacccactcttacaagccaccacgtgtccactgtgtgaccggacctgaagatgagccggacacgtttttattagatcttcacgacaaccaacgacaggacagacaccatggccttcgtgaggagtcacggtcatcggaacattgtaaccgtcaacgagagagacaccgtaagaggagaagtcgtggtgaccaccgtggtggaggtcgaactgagctagagaagctggtggtgccccgccgagaccgttgcattccaggcggtttccgcagtctccggtgaggcaggagaattttccgttgtagtgggcacaccaggttctggcccagatgcgaccggaccagtgtgtggttggaacgttgaaggagcggtgagtgaaagttgggagagcgaagccacctttctctaggacggggtggccggcgttgggttgaatggctggccagacagtgaagggacagttgttgacgacggtgaggaagagacgggaagtgtctacggcggaggagaaggagatgaggaggaggaaggaggcggcgagaggaagagaggttttagccattgtgtagcttttggtgtgaaaggtgtgccaatgcgacgtgtgtgtatataagctaaagtatttttcgatatgcatacattttttggagtgacgaaaataccctttggatgttttgggtggttaggcaatgaatttagcatgtgggtttaaggaggcgaagggctttaatgtcagtttaaaagagatgaatattggattctatttctatgagtcaaaagcttgaaagctctttaaagaataaaatgatggcatgtggtttgtgactaacgaagctttgtttccttcattggtaaactaatcctaatgtgtgtttttggtaaatagcactatttcggatggttgaaaaataacatattctgaaaatattaggcagatatattaatttttagctgtttccaacagttttgcttttctaggatagtaagcattcacatatgtaatgtttacaagttacaatgagtaaaccataatgcaaacattttagatggaccgattgatttatgtgttctaaacttctaaacctattgaaatgtacactctattacatgctatgtgactcatgattgtaacaacatgacaactttctctgaatattagtgtaatgtggctacactgacaagttatattcgttcagattagtaacagggttctttgacaaacacatcaaaacgacaaacaccaaacgacaacacgacaaaacaagatgtcttttgtctacttgtacaacttcgagaatttgaaaatcgtgtaaccatatcttgggcctcagcccaatccaaatcgtaatatttttacctctctctattttatccatgccaatccaaagaacaatgcttctttgtcaggaagtaattgttgtttattcatggggaatcgttgtctcgtttattgcacaaattactatactacttgattcacatttaccatttttataagctgacaaagctaataaaagcaccaaacaaatagattgcaagtttacaacaacgaaatgctaacaaaactgaagcgggcatgttgaaaagtcataatagtacacacatttacgttaatacatttataataagatgaatcacataaacaatttactttgatcaactactgcttttaactttagaatgacctttttgtgccctaatattagataattaccggacatggtgtatgcaaatatatatcaaaagatcaaactaaggaacaagattcaaatctctctcttttctcttccttacttgcaatttcgtttgctttggttctatacagtgcgtttccgcttcgatcttttgcttcttcgttggccaacctcaggaagcggcttgcttgttgtgctcgaagctaacgctccttcacgagcctcttcttcctcatcatcagacccttcttctgattcagactgagattcttctaccaattcaactgtatctttcgcaaccgccttgttcttcttgctgcgcttctcttgctcttttaattgtctaaatctgttgtgatccaatatacatttatcagaaataacaaacttgtaagaaaaacgcttcgtattgagagatataatctccactagactcgggattcacttacctttcgccagcatcgtcaggctgagcaatagatctctttgctcgtcccgcacttattattttgcttgcgttttcatccatatttggctttgcaccacctagtttacgcagatatacttgttgggcggtactaagtacattatttgtgagcctaaaaccataggatggtttaacataagcagtagcataataaaaagggaaaaaataaaactcagatcctaccaataaacacagtcatatacaataatattgatgttacaaaatgtagtcacactagatgattccttatcaaacaagcttcgtattcctcgaaattctaacccgtcttacgtacattttgagaatgaagccatctaggttaattactagagaaaatctttcttatactccatttaatgagtagatcaagggcatggataaaacagttagatgagaagtttcaaggagagggaaaccaaccagtaaatagatagtcctgatgggacagacaatgcaaagtaaccgatcatgagtggaagaaacttgaaaacaagaagcgtattcttctgtgcaggatcatcagtctgacaaaagaaattaaattcggtttcagaacaatcatatcaaattgtttaagtaacaggaaaaataaaagaaacttgtgtttatttctcacttgaggaggcttcataatttccattgacacatactgggaggcaataagtagaacaggtagaacaagataagctacagtgtcataccatcccaatggtggatgcccgtcctgcaccaccgaacgatattagacaccaatttgataaaggttcattgcacagcaaaagactcagttgtatgaaattttttagtataaagataagtatcaaatgagaaaacgtattcacataaagtttttttcttccattaccacaaacggaaaaagccacgaaatgccggatccactctgccgagcagctatagatgttggtccacccagagatggaatccaaaagaaaccttctgtaaacaatccctacaaaaaaaaagtttttagaacaattagtagttgaaagagacaaacttatccggtctctagcgaaatcagtagttgaaagagacataaggtatatgtacctcgttggccacgttagagagagcttggtataaaccaatccaaactggtatggttgctaaagttggtaagcaacctaacataaaaaaaacaataatgtgcatatgtcaccacaattcaggaagggaatacaaaactcgtaacttctaaaagaaagtacctgccaacggattaacaccagcttgtttatacaatcgcgatgtctctagttgtatcctctcctatatatccaaaaacagaacaaacaaatcagactcgtcatccacaagtaactcattctctatccaaagaaactcacctgatttcctgcgtaacgttgttgaatcgctttgattttcggttgaagattttgcatcgctagtgttgattcaacctaaaggattccaaaacaaaagcaatgctcaaaaattctcaaccaacatgccaaaattgaatcaaagtgacaagaggagctgcaaaattcaactaatcacactcactaacctgttgcttagtcaaaggatacgtcgctgctttgacgataatcgtaagcaagataatcgcaaatccataagcataaggtacatgaaccgctgataatccatccttcaaaatctaaaaatccaaaccaaaaaacttaagctacaaatacaatttccagaattctacacacagagatcgaaattagcagcttaaaactcaccttaagaaccaattccatagcatcggagataaaaccaaaccaaccaccactcttctgcacggcggatgaatcagtagttacgacggaatcagcaccaacaacggcggcgtcagctattgtatagagaagagattcagctctggtgaaaatcgctccgatgtctacagatgaatccaagccatggaaaggaggaatctcgtttaagctgaatcgtacggtggttgaagtagtgaagagtttgttattattactccggtatggaagaaattgagcggttcctcctcctcctactccactgtgacggagagatgacgacggtttaatcaacggtgaaccgaagaatgaagatggagacgagactagaactctcgccattggagcttgagaggaggatgagaagagacgaagaagaagatagagatttttatttttttattttgtaaatttttttctggatttatctttttttgaaaataaattggaaaatgaaaatgagagacgaagctggtgatcgcgcgtggtggagattacatccagtcataggagtccacgtggacatgtatctaacgtgggatatatcggtgctttttgtagtttgggcttattagggcccattttagaaacaggcctgcttaacttaataggcttaattaccaatccatcaatctccaagctcaatgcatggatcacttccccaacacaaaataaaactgaaagcatacaaaatagaaaccgatttagaaaatactttatgtaaatacttttctataaaaatcaaatctcgaatgctttgtgaatgtatggtaagcttttccacaaaatatatataattgtgaagaaaaagctgcgtactctctttcaattagttgacatcgaatctgattctcacaccaccacctttcttacttttatttcttgtcattatcactttctttccacgttttatattatgtagtttttataaacaaaaaaacaaatgaactaatctgaaacatttatcgagaacctatacacaaccctaaaaaggtaagcttgagtcataggacttaacttcccaaagccataatccggttcccaaatcttcataacttacgaaatagtaagtgattacaaggcctttaaagattaatcccacaaagaaaatgtatttaacactagagcttgatcgatgtctataatgagttcagcctaaataatggtcgtaaataatgctctctaacgtaagatagttataaattacgctttgagtcccaagtctagtggaaaaaacaaatgggatagaattttcatgcttttagggaattaaatgtgaccgcaaatgggactaagtaaaatcttttggataatgatctctagtgttgtatagattttaggatcctaatctctcagttaataagcaaaaagaacaaggtttaaatgttcatagagggattcgttccttaatctctagctcagatcgatagcttcaaaacctataatcaataatctctcaataattttttaccaaaaaaaacaaacctataatcaccggctcgctctaagtgcacacccatacgtttatgtgatgtaatattcaacaaaacatagctaacgttatgagtttttttaagcatcatactgaattaaatatcttccacattgttttcaagaatcatccaccgttcctcaattatatttcacacgtcacgatcatatatagacctataccaaatactatatatagaaattaaatttaaagttgttttgaaaataattatatttgttattattatttttcgttgtgaaataattatttatttcataatttgttttttaacataaatttttgatagaaatgatgatgttgtaagtttgacaaaaaaaataaaaaaaatgatgatgttgtatttttttcttaattttatatgacaacgaacgattaagagttcgtatttattgttttataacataacgacgtcgacacagaactttcaaggctaaactcactttttgatggagacgtaagaataatttatgggtaataactcattaatttgttactaaatagaaattatttctctaaaatgcttttcaattcatatacaaaggatacataggaaaattataaaaagtaatatttgtatgtacggaccatcagaataataacgtaatattttttaatcaggttgcatattacctcgggcttccattgattaatgggtgcataagtaattaagtaaattcatatgcaaagttaagagtggtacaaattataaccgcatatgcgttctttaaaaaagtaattatgaaaatttgttcggcagatgaagcaaatgattagtacacctatgccaaatcttaaaaaattagaatggaaagcgatatatgaaattgaacgtagtcatattgaattcgtaatcgagactttcactattgtttttaagaatgtttggacgagaaagaagctcataaagcaataaattagttaacgttcataattgaagcattgacaccaggagagaaaaaaagagcaattcattgcttccctagtaaaaaaaaaaaaaaaaaaaaaaaaaaaaaaaaaaaaaatcagatatttgtggataaagagttaaaagaaattgtttcgtcatttttttctgtcataatttcgtcaactttttgtttaacaatatgcattatataaattttattaataatagtaacacatagacacgattgtagcataaaccactaaaatacatggtttcagtgtatctaagcttttgacatgtagaagttctacgtttttcatgataaattcgaaaaattattgagaaatgatatatggtcaaaatgaagaaaaaaagagagaagataacaacaaaatggagaaggacaagagcacaaaagagatgagtgggattatgaaaaggtttgctgatgatttcatgcatgatcaactaacgttaaagattatttgtttttagggtaataatacaacatatacgccattttaggcaatctctttctgaaaaagatgttcgcatttatatacgaaacgactgattattaaagatatatactacatacaacaaaatcgttagggaaaagtaaaagagaagataaaatgtagagacaatttgaaagatctcttctttgttcttcttttgaaaataaaaataaaagtagacataaaatagaagttgtaaatgacaggtttcatctttttcatgcttttttttccctttctttacgtcgtttgataccgagtaaagttattttcatactaagattcagtcattattcttgttagagttattgttcttatatattgaaatattaatatcaataggaaacgagattagtatcatagttttttaatgatgacgtagaacatttatatttcattgaatagttaatagtagacaatcaatggttgttttattgtgaatttggttcacccctttcatttgttttattgcaagattacaagcttatatatgtttgcaatcaacaagataattaatatattcaaaaaagattcatataagagataaaaccatcgccatgaagatatctaatgaacgaagacgaaaacgacagatcagggacaagcctactcttgagtcttgacccacaaagataccctaattaagctttcatgattacggatctatatgataatgaaccctattaagcaaagttaatttatacttagccatcaacgtacatatatatttccaataataaatgcaaataaaaatgataattatgacaaattaaccaaaagttaagttagcaatggaccttggcgttttaaatattggcatggttagcaaatagcatacaaatatatgaaatgatagcctgaaaatctagtaatattatttttattttagtttataaggctcatccattactttttataaaaatgcctttattctgtttactgaaaaaaaaatcttttaacatagttttgtcaatttaaaattctgactgacacaaaaatgtaagtgtaaccaaaacagaaaagtgcgatataatattaaaaatatatagttactgataaaaagtcatactatttagttcagcattttacaatttcaaaataacaagattcccaacataaaaattgctgaaccagaaagcacgactatagctagatctaatgactagaatgaccaaagatatgattttcatttgtgagaaaaaaagaaagaaagaaagagttaaatttgtttgattgcacaactttttcgaaagtccctcttatcactaaaccaattctgaaatgttcacaaacttgttttacttaatggtaaagataaagctaaaatagtattttattaataaacacattgcttaaagcaaatcaaggtctttgactcttttggttgtcacttagaattaatgtcttcaattatctattcatctaggtccctcttatttcttcatacttagaccttgtaaatcatatgtatacatatgtggtattttctaacaaaaatcatatattatagatattattcgacagagggaaccttataggcgaagaaacgtccctccactcaaaccctaaaaagagaatcacaaaaataataatattaatacataagcatatacaaataatgcatgagagtggaaaatatatataagaaaagaaataaagcataagaacatgacccatgtttagaaaagcattatgttctcactttatctttgtgctccttcactatcatcatcttctctctaaacctctatcttctctctttctcttttggttctgtgctcgatctcctcacatctctctttaacctttggttcccttctttcgtttttatatgattctcccaccatttttgttcttttgagttttaaagatccatcaaactttattaaagaaagaagaacaaagagataaaagggaagaagaacaatggttttctcatccgtctcaagctttttagatccaccaattaattggccacaggttctttgatcttccattatacctaattctctctttctctactttctttttgtgtgatttttaccgctcttaaattcttcattgattgttttgattcttatattaataattttgattcattttttctaaaagatatattcctattctcatcttcattcatctttaagctcttcttttttcaaagttccaaaacatattcatggtatttcttgctttataatctcacctatatatagaccatttacatactatacggtttacataaagaaaaacaaacaattttgattgaaaccaaagattgaattagaagtttctacatgttgttctttcttgtattgtgtgattaaattcctttttgtttgtttgtttgtttgcagtctgcgaatccaaataaccatcctcatcatcatcagctacaagaaaatggaagtttagttagtggccaccaccaagtactctctcaccacttcccacaaaaccctaaccctaaccaccaccatgttgagacagcagccgccaccaccgttgatccgagcagtctcaatggccaggcggctgagagagcgaggctagctaagaactctcagccgccagagggagccctaaagtgtcctcgatgtgactcagccaataccaagttctgttacttcaacaactacaacctcacgcagccacgccacttctgcaaagcttgccgtcgctactggacacgtggcggtgccttgaggaacgtacctgtcggtggtggctgccggaggaataagaagggtaaatccggaaattcaaagtcttcctcttcctctcagaacaagcagtcaacgtctatggtcaacgctacaagccctactaatactagtaatgtccagctccaaacaaatagccaattcccatttttgcccactctacaaaacctcactcaacttggtggtattggtttaaacttagccgccattaatggaaataatggtggaaatggtaacactagctcaagtttcttgaatgacttagggttttttcatggtggtaacacttcaggtccggtcatgggtaacaacaacgagaataacctaatgacttctcttggatcatccagccactttgctttgttcgatcgaaccatgggattatataatttccctaacgaggtaaatatgggattatcttctattggtgctactagggtttctcaaactgctcaggtgaaaatggaggacaaccatttgggtaatataagccgcccggtttcggggttgacatctccagggaatcaatccaatcaatattggaccggtcaaggtctccccggttcttcatctaacgatcatcatcaccagcatcttatgtgattgtgtttcttagccgtcggattattcatggaccttgttaaagatccaatgcatatggagaaactaaaaggtatattagaatcggtttgttatagtcaatgggtgcatatagaatcaggtgtgacaaagaattattcgtattgtgtgattatgaacttgttagatgtatgagagtgtacttgtcgagtttgtgtttgttcaattcgtattattcactcaaattttcataaaataatactaacttatctgtatgtcatatttttattttggtttctaagtcttgagtacgtgagaaccaatcagaattattactaaggattttatcattcattgctatcttttttaaagtgtatataatgaataatgttacgggaccaataggataatgcataaagtaaaagagtgttgttacagactgacgaatttaatcatacaattccgtgtcttctctagagatatatagtaaagttttaaaattaccaaaaagcttatgtttctcacatttttaggagctttgcctttttctttttcagtccttaataaagatctgtgcatatgaagatgcatgtacgtaccacgttattatgttcactttccagtattaatattaatccgtacatccatgaaaaccctttacccttttttttcctcttttttgattaaacaacccttactttttacatgtgtataccgtaaatcttggatttatttgacataaatagatacccaaaatgcatggattcttttgatataagacttgatttgtatataaaatcaacttcatcatcgttctaatccatatatactcccgttcaattcctttgtcatttaaagttttttttttcacatggacccataactgttcagaattaacttaaatcccaaaaggaatgatcactgtacaattgactctccttaaaccttatatacaaatatatgataactaaccatgctgctttaaattaaccaatacaagataaccaatttataatattcctccttaaaatgagcaaaatatatcaaggagaccatgcatcttggctaatagatgtataactgagttggatgcataattagtaaacccatccttgattccttgtgacacacaattttgaaaatgtgaatagttgaatccaatacatgacattgacagcagttggagttgtgggatatgtaactcagtgtataaacttgactagccattgaagttcacaaactacgtaagacattgctctgtatagttcaaacaagtactctattattagtcaatagcaaaaaaatgaataaacacccataatgaccaaaactttagaagataatctctaccaaaataatataaaaatacaataaactaggcttgcaccaatttgcatcattttctccaaaatttgtaacttttgaactggttttgaaataggtggaagcttttgatgttacaaacacagtgttgcttgaggaactggaaacacagtgtgtaacaagtactgaggaaacagagaagcctacgatgcttaagagatggtccagaggttattgaagcaatttcaccttcattgttggttcctggcttgaagaataaaccatccaagaagtagaaattgtgaagcaagatttcgaacaccgatttttttattttattttattcacctccaaataaatgcgactttgagataaaaagtgatttataggtatcaaaattttgttctttttgtgtgagtttgatttacaaaaatacaaaaaaactgtgaccaaactttgattgtaaaaacaaaccttgaaactcacacaaaaagaataacccgaatcgaatagaaccgaatcaaaattacggcaacaacaacatcaccaatatgagcatagctgcgattactagctcctattatttgaattacacataaactctgatacattcaaacaaacttatttagaaatgatgaatttggtttttgcaggcaactttgatgcggctatagaaatagcttctctagctactttttcggaaacaccacccatttcataaatgattttacctggtttaaccacagctacccaaaacgctggagctcctttcccacgacccatacgcgtttcaggaggtcttactgtaactggtttgtctgcaaatatatgaactcgaacagttaaaccacgtcctatatttcgtgtcattgctcgtcgtcctgcttctatttgtctagaagtgatccaagctggttcaagtgtttgaagagcatatctactacaaatatacccctgagaagatactcctttattaattcttcctcgatgatgtttctgaaactttgttcttcttgggatatcgctgatggaactctttttttttttttttggtttcttttcgttgacggaacttttttgtttttgttgtttcttttcgttgttggaagtctcgtggacctctctcacacgattcactctcgccggaagaattgtgcatctgaactgccaagttccaagaacctaaaccaaaagtgaatgtaaaaacacacgttaaaaagtttttcatatggtgaatttttttttttacctgtccgaagcgagaaccagtggtgttgagaaggcgttgttgattaatctgtggaaagagatacatctctctttcggcttggttacatgttaggccttctaagttgttaagggactcttcaagagtctgcacattcattgtcacacttatgaacattatacaaagagattgataaaatttcttctcagggtaatattgaatccgacaaatgaatcataatagggtaatgaattgtcgaaccactcaccttcttgggattgatgaagtctggagtaaaaaagggaatcgaggaagtggaatcagaagcagtaatcttcggaaagaaacgagacatagcaggaacagcagtgggagatagagatggtacaagactgagaaatcctcggcttatctgacgttgatgttccacgacgcggctaaacatgaatctctgcatcttgctgctctcagatctatagaacttgctgctcaagctgaagataaatgcatttttttgtacatttattttgccttcttctccacggccaaattaggaaattatatatttaagatttcttttctttaaaactctaataaaaaaaaaagaaacactagtcttgtaattgtgacttttaattaagatccgagaaaatgtgaatttcagacaaaagtgatttacaggtttcaaaatcttggttttttttgtgagtttttggttaataaagaaaaaaaagtgagcaaaatgtgaaaatgtataagcaaaccttaaacactaaactctcagattagggagatttgatcttccaaacctaaaccagagtgttgtttctgctggtcgttaaaacggctaaagcggttaagtaactgtgccgctttgcgttttcctctgtcagtaccattctcagccatttctattaaaagatccataatccctaatttctgagcttcaatcaaatgttgctgattccatgaacacaagtgcactaataccgcagctgagttttctttgttccgcggtgacccgcttcttataaaatctaccagaactggaactgcatcagcggctccaacctctgatttcccgtccggatgactcgatagtatggctaatatcgagagtgattcatcaaccattccgctttcgggttctgttagtaacctcattagcacgggaactaaaccggctctcacagcttttcctttgtttccttgaaatatgcagagattaaacagagcagttgccgcgtcttttttgcctctctgtgatccttcgctcagcaaggtcacaagaggcgggatcgctcctgcggcacctattgtcactttgttctcgtctataaccgagaggctgaaaagtgtagctgctgcgttttctctagcttccatgctacctttctgaagcacatgaacaatacctggaactgctccagatgaataaacaatcttccctttgttctcttgacatatcgagaggttaagaatcgatgtcacagcgtgttcttgagtccgagagtcattagatatcgtgaggagattcaccagaagagggatcgcgcctgaggcagcaatggcgactcggttatgattgttttgttttgctagaagacggatttctcctgcagcagatcttcggtcttcaggctgttgcgatgtgagcttaagtagaagttcttcaatcttgttatgttcatcatcaggggctgacgacgaagatgaggccttactactcggttgagatatgttgggacgctttggaggttcgatgccattggactcacaccattgagctataaggcttcttagaacatagtttggtgtcatgatatcgcttgtcagcgtttcttgcgtctttggacacgtcaagtgtcctccttcaagccacttcttaatgcactcacgttcataagtctacacaggatttcaacgacaccaatcaaaaaaattgaaaatgaattaaaaagacaagtaaagggagaataatgcttttacagtacctgccctgaagaaacaataactggatcagtcatcaattctagagatattggacaacggaactcttcaggcggaattagcatatctcgatcatcatctcgcgacttcggaagcgatgatttcagtctcaatggagcatcatccaagttaggattataagtttgcacaaagtccttaatcttcttaagaaccatagacatcttctcaaaactttcaccaggatcatcaccaccactagaactaaccatgtcaagtaaagccaatgactcttgcgtaaggtcagttatagtcatcaactgaagcttctccgccactctcctaaccatatcagactccattacactacctctaccactataaagagatagaacatccttatacaactcatcatcatacacatcgccaccgcgttttcctaacgatcttcttaactgaactaaaacaagctccacctacaacaaccagaaatgaatctgaaaagctgaagtttcatgaacaagaacaaaagcagagcagataatggttttagtagtacctgttctttaagttcatctgaaatttccagattctcataagggattatacttaaagcttgttccaatagagaagtcactttctgaaatttcaccatcacttgatctctctccaacacctacaggaatcaatcagattcatatttcgatttcgatttcaactacactcagatctaagtatgtttagaatcgaaatactcacacaccaggtaaattttgctaacatggctaacgaaagaaagcaaatccttagcatgaagaagcgattgcttaacagataacaaagcattcactacttccgaagatgattcctgattgtctctgatctcttccaacataggaagaagaagcgacaatcgccgggagaggttagcgcagtgcttcttcatcggtgtaacggaatcggaaattgaagcgatctcgtttattgaatcgattaaggtttgagctaatttgtgtttctctgatttcgccattttttgtattggtttaggaaacacgcagagggaactgttattctagtaatcagttttttttttttggtcacgaggtttttgactcaggcatgaaagctacaactgtgtgaagacgaagacgaaggagtcatggattagtcatgagtcataaaccggctcagatcggttaggctaagtcagcaacattatcaattgcgataatttcgggtcggattgggttgttgtattttttcaacccaaagaaaataaaatagtcaactggtcaaacaagaaataccaaaaaatgagtcaactggtcaaacaataaataccaaaaaaagaaacaaatttggaaaaaaattggtgattgtttttagttaagtggttaatgccagactaatcccaaagaagaaaaaaaaacagtattttagcttagtttatttgtgtttgaaacattcagattttattttaacgtatagcaagctaatttgtatggtatatttcaaatatttggactatatgaacatggagattcacaactatgtatctttgtgttgctactatatatttatacgagtttagataataacatgttttgctctttggcttactcaattctcagagataatttgagaaaacaaagaaacatcaataaaaattaagatttatgattatgaatgtactacttaatgtttgatttgtaacttattatcaaaatttcaatagtttggtatcaatattgagggaaaatttgtttgggcataatatacaagacatcataaaatcatctgtggtcaaatgaagatggtaaatttattaaacgtagaaaacaaacaaaatcaaagaaagatgaaataacaaaattgtaaatatatgcatgtttgcttatacataattggattttgcagtaagagatattcccactattccttagaaagagatatgggttcacatttcttgttgacaaacgacggtttgactatcctagctccaatcaaaacgagataaaaggctagaaaaaagcccaatgggccataactaaatgggctcgttcaatttttgagaaaagtgagaaacttgtgagttgtgagaatgatttgatgatagaccaaggagttatgatttgaacttgtgatacttatgttttgcctttttttaaaaagaaaaaaaaaaagaaaaaaacttgtgatcttgttcgccagtactccaacaacacaagtatattttacggcattagtcgttaattaaatgactaatcaaactctaatcaaaatgtcagctaatttggaaattttctcatctcattgtgagccacctaattgcgtataagcaaacccatgaaagcaacttaccaattaaacatctaattagttatcttaatcacatcttaatcatgcttcccattggacaagcatagctcttatatctttttgaccattattttattcatgttaggtggagactacttttatattttagattagtattttcaagatgtcttatttgaatattcataatacgtctacaattaggatctctcttataacataaattatgttagatatttgaaaagttatacctggctgatatttaatttcaactgtatcattcaaatccaattaaatttctcttgtcattagataattctgatataacatccatccacacttgagtgttttctcaagtggattcttaaatattatatatagttggaagaatcttttggaatcttatgtcacttgatttaaccttaggagatgtcatatgaaattaagtcgtgcaagttatagaatctgagttatatgattctctgatactttcttgcttgtgtttataagaacataacttttgctgctactcaacggattggatgtgttgtatacgttttaaaaatccatttggtgtcaaaacaaccactaatagtctaatacttggcctattttaagtttctcaacttgttatttagtatgttttatttactgaggtatctgtcttagtatataaactatatattatcaacttgtttagtttatatcaaatctgcaatcgtcacatgagttatacggttatcaaatgtatacttaggtcatgaatggtgacatagaccgcacccaaaaccgcaccgcaatagtgctgtaacattatcaaaatctctacatatacatatgtatttatgtattttcgttactatttgaactgcaccgcatttctcccacaccgcaaaacgcggttaccattcaaatccttataattatgaaaatcggctcctaatttcaaccagtaaatcgaaactattataaattataatatatctatatttgtcgttaatatcattacaaatagttaattcaaccaacaaaacaaaatcattatatgaaaataatatcgttatagttagcctcttttgtcaaaaatttaggttaatagatattagttggtgtctttagtctccatcactatcaaactagttacggaaatgttgtattatggcattaaattgaccagcaaattagtatatatagtctatattagatcttttgaatggttttaagaaaactcccttaacgaaaaaaaaacgattttaagataatactctaaatttgttgagttttacttttttgagtgttcaaaacttcaaatgttttgtggttatatttttcacgtatattcgttgtcaacgaccaccaattgtaaacgtttatgatttgttaatgattaaagtgtaagaaaataccataccaacaaaagagattataagccaattttgttgttgttgttttttaacatagaattgccacataggcacatacgacatttagatccaccaaataataatgcaaagagattataattagcgatattcttgtgtttatctctatatacattttttttcatttcttatttgataaaatattaaaaatctatatacttaacttcagatcccagtatatgtaaatttcttatgttatatattaacttcttattcttctttttaactttgattttcactatttatagtaacgaatatcatttacttgatagccaaataaatcgaacatacttgatcagattgttttattttgtatgaaacacctgatcagaatttaactagtttaatttagggaagcgccaaaagtagtactctttattacaattacttcgcaccgacgttatgaatccgcttgtctactaaattcattactttaattttgtttatacgagttaattatgaaatttaagtatagcattattaatctctgccccacccccacatatccgttgatttctcctattttagaatctaacatttatataagctttattagaataacgattctttcgttgacttttttgaatccatcctcaagttcattctaattggtattggtaacatgagattgttgagataggacttctgcagataaaaattaagacactcgacttgtgtatatataaccattgcaacagtacaaatgtgaattacatatgtagcaaaatggtgaaaattggaatcataaaagtgtttaaaaaaaggggataaaatttactttttgaaaaaatgagacatggaagtaagaaatgtcggtgaaaataaaaagaagagaaaaatgtcgagtctgacaaagctcgcgtgccgatcaatttatttaataattcagacttgtctcgtttcacaatttcataaagttatgtccaaaaacttctgcacctttgatgttatcaacaactccatctaccgtacgctttctatattcattttattttttatttattccatttgattcttaaccctacatttccctttttatattgattttttttaactattattcgtttacctaataaataaacagatgagaatataatcaaaccatgcaaaaacaaaactattgagggatatgagtcacttctttattagcttcaacaagaatttgagatacttggttattgagatgacgtttctatgggtatctttatctatttttgatcaaaatgtttacgaatagtgaaatcaaatcataaaaagtgtttctgagcgagtgatagatgctttccataaaataaaataaaaaatgggcaaatgatcgacggtgaaaaaagttattttcagcttcaatcactcgaattcatattattctttacattgttttcaagttgataatgattacgaaaatatgtaaatatcaccaaaaacaagtagtaaataccaaaacataaaaaaaaaaacagataatgtgcctgtataattctcagcagagtagagggttccattactatcaaatcagttcatcaatgtacaatgataaataattcataagaaaaaaaaaatgagtatgcatctgatggtagttgaaaataagtaaatatgtctgttgaatgtgtatggtttataactttacattatttcatgcgaattttacgtaccaaacatggaatctttttttgttcttgctcatacttcagttaattacgttagtaattcgtaaaaaagtttcgtggaccccaaaacgaaataagatcctcatgacaaatgccaatctgacacaaaacagttatgtcgccatggtactatgcatgacacaaaaagtaattaacacaattaaaaaggataatcaagagaaaaatatatataaactataatttcttaataaaaagtacaacatttttagatttaggatttataatttactttctatggttgtaatttaaaatttgagatttagagtttaagtatagaatttagttttaacgttagggttttgaattttaaattgaaattatgacatattttaaatgaatataatctaacattcttagttttggtataaatgtagactttattttagttgtttagggtctcataaaaatgaaaaatgtgattaggtggatacaaaaatgagacatacttgtttttatcaaaataaataaatgagacatgcttaaggaccccctacccataccaccacaacacgctttgaatcatcttcaatagatgataagagtcatgtagtaaacgctatacgactattcagtaagaaaataaataatttggtcaactatttcccatcataaatatgacattactatatgagtgagtatatagatatttcgtcaaaatgaacgcaccgatcaatggaaaataaaaggcacccatcaatgagaaccttataataaaacacacacacacaaattccgtatagaccaggtttcagtatttttgttagtttggagtgtaataactcttttttttttcttggagtaaaaatgagtacaagtaccttagtgaacaaatttattgttttgttggaattaaactgttgatcaataattcgacacgacagtaaataactcactgggacaaccaaaaaagtcatattaattcatggaacatatatatgctgacaaacaaaaacaaatcatggaacatctatttggtgttttccaaaagcaaatatcgtctttaagtcagaaaatgcaaacaattttggccgcaaaaaaaagcatgggttagaaagtttgaaagaaatcgagttatatcaaactggtgaaaattggcgacacaatctgttttttactgaatatgtttctattaaaacgagttcggttgtgatgtttactcaactagtagaaaaaaaaaaaaaaaaaaagaagaaaaacgccattctggtcaacaaattttgggccaatattccaaatacacgttactatattttcgattgaaatgtcgtattgtaattaatacagtatagtagtagaacaatattagagacacgtacgtaggtttggttagatgcttttgtctataactctatgccaagtaatgattggtgattcgtcaatcgtaattctttttttttatatataaacccaaataatttgctttacaatctctgaattctatgttttgagatcatccatattccaatctaactgtcgttaaggctcttctttcaaaggaagaccctatttgcaagttggacacagacggacaagttctcaacgattaggagaaaatcgttaggactaatcaaagttttagataggtaccactacctaaataaactatgtacgaggacgatacatccagtacaagagaaatatatatgcaacctcatcatataaaatcatagtcacgagattttatgacagatcttagtcgtacataaatggctgacagatttgcatgatatattgcaatgatatatttttttttaacccaaaacattttaccagcttatatcaacaatagacatatatataatctgaaataaggaatctaataaaatagctcttaatattgaatttaaagaagaaaaaaagtgaaacaaagcattcgagatttgatgtcgaagtccacatcgggaagcgaaggtcatcaaacggccacttggactccgatgagaaaatttcaagtgggctgcttgttggcttttagtataatattgaccacaaattatttatatgctttttagttataatatgcagatattgtatctatataatactccatgaatagtatacatatgagtgtgtttctttttgttaaatatccaaggaagagtgcataatcattttggaaccatttatgtttaaataataaaatttatgatatatatactgtatcaaaataactatgtgttattagagaaaatgaagatatagtcattaagttaggtaatttaatatgtacaatattttaagaatatcatgtcattttataaatttatattatttcaaaccaaactaaattgctttagcttctgtcgaaactgcctactatttaaatttgtttttctaaaaacttctttgatcgaattagctttcccgaagttctagtacaattctaaaaattgtgtactagaatctacaaatagcatattaaactttaaatttcctttgaactagcttgtacataaactaccatttcttttcttgtttatttgtgacttaagtgttaaaatttttcttcacaccatctagcaaaacacctaacattgttccctttccaataatcgaatcgcctatcctacaatcatcgataatttagtataggatctagaagacttactatgactaattttgacaatggtgaaataatcaaactttttttattaaactaatgtgttgtattggatcagaaaacatgatttacataatgtttgtaacattgatatcaccccctacatgtatattaaaagccttatcgactccaaatttttaccgaaaaaattgaaaaattgttcaaaaacacagttttaggatctcattatacagatcaaatcacacgaattcatatcataataatttttttggaagtccggttattttactaatttgatccaacatatctatgatgaatcttagttaagatgtggtgatcactcaaacagtaaatttgtaaattttgttcattaaaatcagtttcttgtggacaaaaccatcctatttttggcaaatcaaagaaaatataattaatctcaaagaaaaaagctacaagaaaaaaaaaatggcctcaaaataaaaatagaaaatatctgacaagactgcccgaaatcacaagtaactgtaacaaaactgacaacgggcaaaaaaaaaaaaaaaaaaaaaaaaaactgcccgtcgggcaaatcctccaatagagagtcgtctctctttatctccgtctctctcttttttttttaatcaactttataaaaaaaacaaaaaaaaaatttaaaaattaatatcttctcaacaaatgactctatcaatgtgtacataaatgtgaatcttcttccctcttcttcttctccattgttaaaagctctcacacaaccaccgttctccgtcacggtggcgctttattctctcatcggagcgcctcaccggtggcagacggtgtcgttgttcctctcctaaaacctccatcaatcaccatctctttacacagagctctaaccaaaatcttcgagagatggggcagagtatgagctgtggaagtcgaccggagcacggaatattcgcctctgtacagtgcggcgatatcatcactatccgtcgtgtgatggcgacggagcctagtctgttgaatcaaactactccttatgatcgtcactctgttcttcatgtcgctgctgctaatggtcagatcgaggttagtttcagtgatattctccgagatctcgccggaatctcgtcggaatctggtatttttgtttctgatgtatctactttttttgcagattttgtcattgcttttggaacgatttacgaatccagatttgttgaatcgtcacaagcaggtttttgattttcgcattgatctgttctgtgtatagttttcatgaatcttttgctgatgctttgattcgtcttgtagactccgttaatgttggctgcgatgtatggaagaatctcttgtgtgaagaagctagctgaagttggagctaatgtacgtttacttttttgttttgcaattgaatcgattttggatttggtaattgaaaatcttttggaatctgcagattttgatgtttgattctgtgaatcgaagaacatgtttgcattacgctgcttattatggacatgctaattgtgttcaagctattctctctgctgctcaatcaagtcctgttgctgtccattggtaagtctcttcctatctttgatcagagtttacttattcctgagaatgaaacttttgacactcaggggttttcattttcaggggatatgcgagatttgtgaacataagagatgataaaggagcgactccgttgcatttagctgctcgacagagacgacctgaatgtgtgaatgttttgttggatagtggttctcttgtttgtgcatctactagtgtatatgggtaatggtttttcttgtcatgcattgaaatcaacagttcttagatgttttgttctattggaactgattctttaagcttttgttgaaacagttctccaggaagcacacctcttcatttagcagctagaagtggatctatagattgtgtcagaaagttgcttgcttggggtgctgatcgtcttcaacgagacgcttctgggtatatatataaattttgtggaaaagtcttgttttggtttcagaacataacttgaatcttgaaatatcttttcaggagaataccttatgtggttgcgatgaagcataagcatggagcatgtggagccttacttaatccgtcctctgcagagccacttgtttggccatcaccattaaagttcatcagtgagcttaatgacgaggcgaaacttctcttagagcaggctttaatggaggctaacagggagagagagaaaaccatcctcaaaggaacagcttattccttaccatcaccctctttctctgacacggatgataacatgtccgaggtaataatactacactctttactttccccgtggctcggtaatttttgtgattgtagtaacatgtaaatgtgtctataggtgagtgatacggaactgtgctgcatttgctttgagcaagtatgtacaattgaagttaaagactgtggtcaccaaatgtgtgcacaatgcacacttgcactgtgctgtcacaacaaaccaaacccaacgacctcaaccgtgactccaccggtctgtccgttctgtagaagcaccattgcatgtttagtcgtcgcccagaacaacaacaacaacaacgaaaagagcaaaagcctagatgatgttgttgttgttgatcgtgaggcaggtgatgttagctcctccaaattcagaaaacatagaagatcaataaaccttggcgaagaaagcagcagcttcatgggactatcaactattggatcattcggtaggataaccggccgtggctcgggaaggatcgcagccgaaaacgagctgatggacaaaccaatattgtgagggatcgattccgttttaagggacattttggggcatgggggagcaataaaaaagatgaggggatgaaattgtgagaatgtataaaatatagatgaatttatgttagatcttttgttgaagggaggaagattgaaataaggaaaaagatgtggggaggtgtgtaatgcaaggatttgttgtttctttgattaagtttggccaaaattgtttgttgttgttattatttggttacttgatatgaaagggaaacccataatctttttgtctttgtctcactttttttggttattttctcacttaacttaccaagaaaaggcaaattagacttttcgcctactatttcattaaaaatgataattttcgtttgtctaattttatattttcactatatacaaaaacctggagaatttaggttggatttgtgagaagggaacaaatgtgatgtgaacggctgctaataagtcgccaacgaccaacgtggattaagatggagagtctgaaaaagaagaagaaaaggttttatctcggtggtgtttagggatcattgaccctacacgatcccatcactttctagcaacttgtggtctccaaatatggctcctttgtactttaactaaaatatctaaaacatttttaactttggtcaatttagatcaactagtagatacacatggccactttttgtttattcttggacaattagttttggtacgtcaagacaattagtatcgagtcatagggaagaccgattcggtgggtatttatttatctaaatcgattttagaaaagtaaacctactggttatgataacataaaattagacaaacgaaaagaatgcgtgattgatttcttacttttatatgtctaaaacgtgtttaagcctaaagagtaggttgaatcgatgtcaagaagaagaagaaaaataaaaaaataaaaataaatacaaagtgataaaaattagagggataaatggattagatatcataaaattctacaatatttgaaaatggtatttgaacaacaactattaagatccatattcgagatttttggatatctggatattttgatatccaagttttagatttcgaatgtccgtccaaacattgaaatattctaaaaattcaaatcatatccgtgagaaaataaataattcacatgaaaattatataaaatagataatgctaaaattttaaatatttctatgcaaattaaatctactatagtataaaaatgaaaatgagttagtatatgtagttttatatgaaaaatcaaatactacagatgcaaaaactattaggtgatttttttttccatatatttagctaatccgattgcatattttataatcaaaatatcaaaatttagaactagtaactctgatgaatccaaaaaaaaaatttagaatgggtgtgatgaaatagtaaataggattttaaatctttgatagtaatttcatcgctaaacacaattaggcaatttatgatgcttaaacctgtcccagttttggtacttagtaattccacctctagtcacaattgtgtaagtttgtcatgctttgacatttcaattctaacttttcggacccacttttctggtggtataattagttgtcgggttatgaacccgacccaagggttgatgaaagcagatttagattagataccttaacccaccaagaaactaatttcgatatataatatcgacataatatgatccaatcagtttctctagccccccccccccccccctatcactttcgtgctacatgataatatccattttattttccgtttcccaagtactcgtggtcacatgtcataggactcgcaagtcacaccgtacatatgtatgaaagttcaaacgtgtcatattgtcttgaaaggttgccaaatcaacgtctcttacttacacttacctgatctttgatctctaataataccatcgaatatacaaacacactaaactgacaatacgcgacttatattccctaacattcttctactcacaagttaaacatacacatatgaactgataaaatcatgtcattttgaatcatttcgaaaaacaaatgagctaactataataacatagaacctaaacttaaatataattatagttctcgatccaggtttacaagtttttgtgtataattaagaaattttatcactgtctcatatcctgaaagtttcgtaaactgaagtttgtatctagatgtagctgaatacaagacaacgggcggttgggttattggttgaatctaaataaacagaaaacgtaagtatttagaactacacgagctaaggtaaaattttaaatgctatagaaaatgtatggagtttaagcctagaacttccaggttatttaaaataatgacacactagtgagtttctgataactcagattattgtatgattttgatgttgagattgttcattttgctatactcttttgtaacaaaaacctccatgtttacttttcgattatcccatgtattcatcaactacaacttcagaagtgtatccattattggaaaccatatgcctataacggtttcccttgatcaagttaaatatttcttaagagaaacatgtactcactaactgtcacaacaccggcagatttctcttcgatccgtatcttaatcctcggaggatccaaaatgcttcatgttaaagcatatagagagaacgtgcatttgatttgcaacttccaaatgttcccttatttgcttttattaacagatgttgatgctcctctaaaagctctaccaatataagatgttgaaccttttttcattttttattaataaaagatcgatgcaaaacaaaaatacaattttaacataagaaataagttatacaacatcattgtaacaaaataaaaacaacacatatattaggtgaagacatggtaaaacgatggcatcttctctcatatttaataacacttagggtacatcgtgaaaagtgataaatatacaatgatgactttttcaaatcaattcaaggagaggtaacgaggcggctagacaagaacaccgtgcacccgtcctttggcgacatcgtggggatatgcacaatctcatcgcaaccatctgatcggaccctcttgaaatcaaacatcgaggagaacatggcaatgaagagcacgaggtggttcagcgcgtaacgttggcccacgcattggtgcgagccaattccaaaagttaggaaattgcgtttgaacacctcatcctcttgccttgtctcgctaaaccggtcaggatcgaaccggtctggttcagtaaacccttgaaaagaggcgtcaaaaagggaaggaaacacaattgtaccttttgggattgtgtacgattccgtgagacggaagtcactaacagcaacatgtgggaccatacttgctggtggtcggtatcttaagacctcacgcgccacagcccgaatgtacttcatctccgcgagctgatcggctgtgatcgactccttggactcaggcgaccaaaatcttgcaacgtcctccctcactcttcttagcacttctggctcggactcaagcagcaccactgcccagaggagtgatgacgtagacgcgtcctgtgaggcaaacagaaaatcaacgagcacacaactaatctcttcgtctttggagtgaggcggtggaggactctcagctacgatcgaatgcgtccagaaatcgactaaacatgttggattctctcctgcggccatcttttcttttgattttctcacgcaaagagacattgtattcactagcctcgataccgcccgacgagcctccccgaacgtgaagccagggaggtcgatcgggagcgccattgttccaggattgaacacattgtaatcatcacggatcgtgttcttgacttccttgtcgagatatggtccaacaaaaaccgtctgagaagtctcgaggttgagttcacggatgagttgtctcatcgaaaccggacgagatccactggaaaaactttcctcccactgccgtaaatgacggaggataactatttgctggagggaagaataagcagagagtggcttgcgggtgaagttaggagcgacttgacgacgaacggatttgtgattctcgccaaacataaagataaggctatgatcaccgaagagcttctttccgaatggatgtccaacaagttggaaagcatcgggacgaatgttggagaagactttattggagagctctgcgtctttaatgtatatgatgaattttccaataaggtagttgacggagaggccaacggacgtgtccgccatcgcggattgcttgtcccagaaggaagttgggtcgcgaataagtgcaacaacatttccaattatcggaaagacaaagagagggccagggaggttacgtttcttgagacggtaaaagagttgctcgagcagaaggaatagaagtaatgctgagactaagtacggtgtaagagaagcaaatagggaaactgaggaaaccattgctctttgttttctattatttgctttttgtcgtacttggtgttcttagtttggtaggttttgcagaatatttataagaggttttgggatattaaattgaactgtttgcaaatttattaagacaagaagaattcaaatgtctttcttttttgggcagtcttttttttttttttttctttttcgttttgtttcctcttttgtcaaatgatatgtctttgtctgctctgtttttttaacttcgtaagtatgtcattgttcacgtgaagagagaaagaggaagattattctattgaattgatcctaatttgtgagtttacgtgattaatgactttttgtgttgaaaccaaatgacttgtgatgagttatagaaattttgatgttgtctttaccaatgactttggtttcaactaccaaatgaacttttttgtttttgtttttgacagtctttgtcaccttaaaaggcatagtttgggaaccagtatatcaaacctattaacctgatttcgtctaaattctcaaaatatctggatagagaaattcgcaacatcttatatgccggtcgggaaaataaacgatttctggatgcattgtcactttagtttagagtttcataacacaagctttattcttttggctgtaaggctctgaattggatactaggttctattatagcactcacgctcagttttgtttcaagcctataaggtcgacgttagctaacttagcttacacgcctgcttgtttttcttctatagtttcgttgtaatttgttttttttttttgttctaaatattattattattatttataaatagaaataatattaaattcttactatattactttgtgtttctagtggccgttttataaattcaacttgtttaacacattattactttatcatttttactaataggatctaatacaatatgaccaatcataactattatctttgatttaatttactgataatttatagtttgattagaacatataacctatgatttaacgataacttatagtttgattaggacacataacctaacaatgctctcatcctacatcatctttgaggaattacgcaaagcggcttttgacatacatcgagacaaagcaccagagccggactgtttttgtgctagttttttccgcacttattgagatattataggagctgatatttcccaagagatccaaacctttttcaattttgggtgcatgtcaatcagaatgaatgagatatcagctcctataatatttttgggtccatgcaaatattattagtatgcattacctttataggcattaacggtgcatttattttgatgttgctatatgatatatttggccaatttactgatataataaaccgtagactaaagacttggtaaatgataataaaaggcttttattaaaagccccactaaaccgttgactcaatacttggtaccaattattgatgattgaaggggtggaagactttcgtaaaataattaaaccgttgactaaagagtttcttcttattaaaaagacccaatggagcaagcaacgtaataatgtgtgacgttaagtatatcgacatcactttaacaagcgacatttatttttatgtctaatatatttggtttggtttaagtaagtttagtgactgtttttctgtgacacaaaatcaaaatctctctttttacattaaccgatgtaaaccgataacaaatcctttgttttagatttattttaagtcggtttagattgtcacgttaataaaccgatatatacccgcatttgttttgtagtaggaatgtcaaaataagttattgtctataggttgacttgaccttgtttgcccaggtttctagtgggtttgtgttgagatgttaatccatattaataaatgatggtcttgtgtttgtttgtatctcatcatcagttgctggatcagtgagacttaaagatgttctttctctatttgaggccactcaatgtccattagatatcatgtggttggcaatgttatcttgttacgcagagcagacatgatcaatggttgtgactggtgtgcggatttgttaaactgattatttgtgtgacaagaagacgcataatagtcatcccatgcaggattggtctaacatttttctactagtgcgaagaagacaagacatgtgaacttgggtttcgatttcttttaaagcccactaaaatagatatttataaactcggattgggaaacaccttcgccttaatttcagtgatcaagcatttaaatcatcttttcaaaactaaattctacttttacgtatccaaggggtatttttaccaactctgttgtccaatcccaatgctttaatgtactctaaaattctattaatcgtcgtgcatacatcccgattatttccaatgtacaaaatgtgttaaatccaagagaaaagaaaaagcatgcaaaaagcgtaggatactattacccaaaatcaaatagccttgtcacttgtcaacaaaaaacatactagcaaagcttattaaaaatatatttgaaaaagttaaaataaatataagtgaaatagatagtttctcactagatagatagtattaaacttttgatttgggtgccacaattctaatcactatttccggaactagttcaaaacagtttgtactaatggttaaaatgttacatcaaatctagatgatcgtctatgtttggttgtctctaaattatggagttaaagtccttcgagaatgattttcagagtttgatcttactcaccaccaaatcagatccttgaaaatcttcttttaattttctatttgctgcttgtcgagagtttggaaaagtaacatttttgtttttgctaattgttgcattcacaactgcagcctcgggactaattgtagatgctgttaacaattcagtaactcacgttcagaaaaaaaagttctgaagctggattttctgaatgatctgaagataataatttacaatatacacgtacacaaatacgttcacttgaataaatagatgataagtacaaaaataattgttacaaaactgaaaactcacaaattaaacagtatttactttaaggattttttacacaaacctttaccaaaaatgtataagtagattggtagaggaatgttaatgaatcgtataacaacagtaatgatttgagatccgaatataaaatatgcaaataaaggtaaaatttgaacagatgaaacaagttatataacattattgggacaaaataaaacaagaacacgaattaaatatggtgaagacatggcgaaacaatgacatctcctctcaaatttaataacacttagggaacatcatgaacaatcatagaatatacactgacgatgacttttatcaaatcaattcaaggagaggtaacgaggcggctagacaagaacaccgtgcatccgtccttgggcgacattgtggggatatgcacaatgtcatcgcaaccatccgatcggaccctcttgaaatcaaacatcgaggagaacatggcaatgaagagcacgaggtggttcatcgcgtaacgttggcccacacactggtgcgagccatttccaaaagttaggaaattacgtttgaacacctcatcctcttgccttgtctcgctaaaccggtcaggatcgaaccggtctggttcagtaaacccttgaaacgaggcgtcaaaaagggaaggaaacacaattgtaccttttgggattgtgtacgattccgtgagacggaagtcactaacagcaacatgtggaatcatacttgctggtggtcggtatcttaagacctcacgcgccacagcccgagtgtacttcatctccgcaagctgatcggctgtgatcaactcgttggactccgacgaccaaaatcttgcaacgtcctccctcactcttcttagcacttccggctccgactcaagcatcaccactgcccagaggagtgatgacgtggacgcgtcttgtgaggcaaacataaagtcaacgagcacacaactaatctctttatctttggagtgaggcggtggaggattctcttctataatcgaatgcgtccagaaatcgactagacatgttggattctctcctgcggccatctttgcttttgattttcccacgcaaacagacattgtgttcactagcctcgataccgcctgacgagcctccccgaacgtgaagccagggaggtcgatcgggatcgccattgttccaagagttaacaaactgtaatcatcacaaatcgttttcttgacttctttgtcgagatatggtccaacaaaaactgtttgggaagtctcgaggttgagttcacggatgagttgtctcatcgaaaccggacgagatccactagaaaaactttcctcccactgccgtaaatgacggaggataactatttgctggagggaagaataagcagagagtggcttgcgggtgaagttaggagcgacttgacgacgaacggatttgtgatcctcgccaaacataaagataaggctgtgatcaccgaagagcttctttccgaatggatgtccagtaagttggaaagcatcgggacgaatgttggacaagactttattggagagctctgcgtctttaatgtatatgatgaattttccaataaggtagttgacggagaggccaacggacgtgtccgccatcgcggattgcttgtcccagaaggaagttgggtcgcggataagtgcaacaacatttccaatgatcggaaagacaaagagagggccagggaggttacgtttcttgacacggtaaaagagttgctcgagcaaaaggaatagaagtaatgctgagactaagtacggtgtaagagaagcaaatagggaaactgaggaaaccattgctctttgttttctattatttgctttttttgtattgcatgcttttttgtcttacttggtgttcttagtttggtaggtttcgcagaaaatttataagaggttttgggatttttaaatggaagctatagcatgattattaagacaaaaataattcaaatgtctttcttttttgggcagtctttttctttttctttttcgtttttgtttttgtttttgtctgttctgttttttttaactgcgtaagtatgtcattgtcgacgtgaagagagaaagatgaagattattctattgaattgatcctaatttgtgagtttatgattaatgactttttgtgttgaaagcataggtgtattaatgtatccatgatatagataaatattttttaaaagaatcattactgttaattgcttcattcatagatatttttcttttcgtctttattttaacttattaatcatatatgttaaattttgaatttatctcgatttttgagttgactggacagttctaaacttctaataccttattgttaaatagataattttgcaaaaacttttacttttacttggagaacattttgaggttatctctaccagtgacttttgtttcaattgccaaatgaatttattgtttgacagctgtttttaaaaaaaccttaaaaggcatacagtttaggcgcaaatcatacctattaacctaatttgctcttaaccatcaaacgatcattcataatttcataaacttatgatggcatattataaagcttttctaagttgatgtttttgtttaacaaataagatgtgcgaattcctttttaagcatctaaatagaggaattcgcaacatctttctagtgtatgcatgtttttcttctagtttcggtgttagtaaaaaaaattctaaataactataaattatacccaaaagaaatattatcttgttaatcgtcaatcatgtggaaaaatataaaaacaaggcgcgagttcagcacaacagtttttaaagcttaagatggatgtataatgatatctcaaattacatgtgattgatgatatcattgaccaaactaacatttgtttcgatcactgatctggaagaatgatgcagtttggaagatatgcgatttgtcaaaattgttaacatgatttggacgccatgtccattttgtcgattaaacataaaactattcttgaatataaattattttttgtgaaagcaaaaacccgatgtcattacagtgacatgctaactgaaactttatttatatatattcaagaataatctgcatgtgttttacaccaagtgaattcatacaaaaattataacaaaagttgtatgtaagaaaaatgaaatcaataatatttaaaatccgaaaaacatataccatatattttcaagctacacttattgtagaagagttattatttatataactccctttcattatttaaatatgaatttatattacaaagaaaaataaatttgccccttcaaatgcatatttcattccacctaattttaagctcatttacatatttagcccaattgtttagtattggaagttatataaactatttactataaacaacaattttttgtactatgaaatataaaaatagttaatttattttgataatagctaaacatatttcaaaatatatttatttacaaagtgttacacattttactatattaattttaaacatttcttagtcaaccaaacgatcttctactccaagtaagaatgcatttggacaagaatcatttttctactcagatacccaaatatgtggtcgcagttcgtatataaaaaaatgtattttaccactcaaaaactcttttgaaaccttgaccctttgtgaatacattctttacatatcaattcaagaacattttgtataactcatctgtaatttgtaacaacttattgtgtatatcacgccgatcgaagtatcagttttggatcaaactctcatcgacacccgtctttgaaaacctcagagttgaaatcgtgctctggttttcttaatttggtttactgatttcggatatgaatgcaaaatagaaataaaaatagacatgtatgatggtatgaaacacgttataacatggatacatggctttgaccaccaatacataagaaaatgcaaatcacgttataaacatctatctcccacgaatttccgaacgactttggctgaaggaaaacgatgtatttcttgtagtaccaattatttctgccaatgaatttggtttcaactaccaaatgagtttattgtctgactgctctttcaactacctattaacctgatttactctaaatcatccaaagatcattctttgtattggctactaagctctacgatggtgctaacgctcagttttgtttcaagcataaggtcgaagttagcctaggcgtctacttgttttttttctaataatttggttgtaagtactgtcttttattttgaaaataataagaaaaaattattctcaaaatctaagatatagtattttattaagattaaatcatgtgcaaaattcaaaatcatataaataaatagggcgcgagttcaacacaacatttgtttaagctttttttttttgtcaacaacatttgtttaagcttatgatggatgtataatgatatctcaaattacgtattaacgtgtagcgccatttcaagtgatttttttgattcatatccaaataaatatactatgctttcttttcaatgtgagtgatgatatctttcctatattaatgcaggtataccttggttagcctatatttttattacttactctgtgtttctacagacttttcaatgttaacttgttttggaagcataacttcttagatcaatcttacttgagtctaatacaaaaacaccaatcagaattattatcgctgatttgctgattgattaggattatagcctaatgatttgtattattgtcttggttgtgttcccactcaaatttgaatctggtggggtttgcagaattttctaagaggttttggtaaattggattgaaaaagaagcattgcttaatgcctagttgtgatcactgttatgaaaatgggtgccatttggttacttgttgctaaaaccaaatgcaatgcctttgataagatcggtagaagcaacaaagtgccattgttggttgtgttgtgttttgttgtgtctcatcatcagttatgtttggttgtgatctcatcaccagttgctggatggcatgtcgttggcactattgtcttgttgggcaaaataggcatgatcagtggttgtgactagggatgttaaaacgggcttgaaggccgtagaccgaaacgggtgctgtctaatattttttagcgtaaacacgtttatttaatctatttttacacggatttttaaaatacgggcctatttatatttgaaaaaatgtttgtcagttacacgaagtataagccaacacatcgccacacatgtagactttaaaaatatctcattagctacaccaaatatttccatcacatacaaacatacacgaacaaacataagtcatgtttccaacaccataaccatcttacatcgaagctccggtcgctagaatccggtagttaaatgggctcaatctaaacgggctcagtttcaattttttttgttaaatggggatgggcctaaatggtccaatagctcgttttaacatccctaattgtgtgaaattgattgtttgtgtgacgagaagacgcatgattttccatatcagaatcttaatttgcttagaggacgctaatcatcatcaccatcagacccgaggaatttaagaagcaaagaaagagaagaagcaacatcagcatcagaagcagattgagcgtagattgaaccaggaaattgtggagttcttcttgattatggcagcgacgaattacagtctcttgtcttgtgaattctcacgtatgagtgtttaaatgattttttttttcattttcgatttaaattttagaacttttgcacttagacacctcacctggatctaagcccactaaaatagacccatatgtgtagacaattttttttctcacgcttagggaaacacattcgccttgatttcagtgatcaagcatttaaatcatctttttagattacaatatacctttaagcttttaaaatatcttttcaagactaaattctacttttacgtatccaaggtattttaccaactctgttttccaattcccaatgctttaatgtactccaaaattctattaatcgtcgagcatacatcccgattatttccaatgtacaagatatgttaaatccaagagaaaagcaaaagcatgcaaaaagcgtaggatactattacccaaaatcaaatagccttgcacttgtcaacaaaaaacatactagcaaagcttattaaaaatatatatgaaaaagttaaaataaataaaagtgaaatagatagtttctcactacattatgtaaagtcgtagtgtattacaatttggttattaggttgctacgttatacaaatacagtacgtacaaaacattagatgtatctggctttcttaattttgttacatagtgatgttggattaaacaaacaatcaatctctctagaaacatttagaatgatcattctcttgcttctatatgaatttctaaccttaaggcttctcgacgggactcttttaggtttcctaggcgccggtggacaaattcttggcatcgccgagagaatctggtctgaacgagtcggagttttacaataatcgtcttcttcttcttcttctttcttgacggttgctccttctttgcgtgagcaattattcgtctcttgggatttaggttcaagatcctgatcttgtaattcttgatatataggaggagtgatgtggaactcgttttgtggatcgctctggtctgaaaaccctagagatggttcatgaaagaaacctagttcggtttggcagagattgtttgggtcggagaggtaaattccagcgtcggagaaacccatctttgagaagaaacgtcgctcaaacttaaagcatatatgaaggaagagagaaagagagtgagagagtgagaaagagaattttatggcttttggtggcttaatttgctttatataatagtaatactatgtacgtgtaaatatgaattgtgtttatgtaaatatattttatttgcgaacattcgggtttataattaatgttgaaggatccgatgcaacaactatactttatgtaagattgctttattataatagtaaggttttcgtaaaaaatggttagtctctataccaatcacatgtttctcgccttttgagaacacattttgctttaagatccagatgactcttttaaccaaactcacactcagatattttgtaggaaaataaaatataaatgagatttcgtttataagattacaattagatgaaagaccacgttaattttgaaatttccttataaaaaaccaacaattaaaatatagactcttgtaacttgtttaaatttcaaaactctaattatttgtctcatcttcttatattgatataataaaatttgcattccataaaaacaaaataaataaagaggcatacaaaataattgtgtaaagatgatgaaaaaagcttgaaagacaattgacataaaaacaagaaaaggccagttttgttggttgaaaagaaaaagggcaattagtttcctttattcataagctaaaagaaattattgaatttagtgtctaaaggaagataagctgtctctttcatcttatttaaatttggttatatcataattttctaatattttactttctttcatatcctaactttgatgcatgtgaacatcgatctcacatgccttctatgttatcacacccacctatatatacactactacacatcaatttatctattataactattagcatttagcttgacccatcaggccatcacacatctattaccatttgtgtgtatgtatctagttcgatttaactgacaaaattaacgaatcgttgtgtagtatgtactctgtagccattgaaaaacgatccgttagcattaaactatccacctaactgacaaaactcttaaatgatgttaatgatacaaatttagattctatcgacatatctcaacatttgtcattggtaacgaaagtcaacactaataatagattggatatgtttgtttgattgtttctgttatgctcatatgtatttatatataaactaataacgaaaccaaaatcaaagatcggtggagataattgaagttcttgtccggattttgttagattaatatgtgtaaacattctcttattcgcatgcatgtgtttctttttccaaaataacaaagtaattggaaacaagacactctcgcctacgagatatttttttaaaaaaaaataaagaaaaaatacacataccaaagaaagatatatagtatcagaatatttaaattagtgatgaatttttagtttattttttgggcctataaggagtgacgacttgttctactttgtaaaagaaggttgttttctttttctaagcctctacttccaaaagtaaataaatacaaagtttctttaggtactaagatagaaacgttcaatcaaatcacgagagaatcttgttaatcataaacggacaaaaaatattaagatgatttataacagttttcttaaaaatgaactaatatcagaatcactgtagaacttgcaatgaacaaattgtttagacgatgaggagtccaaatagttgcaagctaaaatacaatcagaacgtaaaatttatggtacaaacacattataccatgaatggaacgtaaaaatttatggtacaaacacattagttgcaagctaaaagacaacgaatggaacaaacacattatgatataacatgatcataggtttatggtaactttatagaaaataaaaattttaaaatttattacatttatcaaaatcttaattaattttgtagcactagtttgaaacggttttttaaataattattttggtcaactaaacaaattcaacacagtttttttttcattttcttaaactattaaataaaaaataacaagtgacaatcgtagtacaattctaggtatgcgcttaattacgtacctttacccacaaacaagaaaagaaatgtgaatggtggcactacacgcgtttgttagatttgttggagatcacattatctatcactatctaccaccaaaagtatatcacattttgaataatttctttaatattcaaaagaaataaagatctaaattctcgggattctttaacaatattatctcaatcaacaactgaatttaagcagataatttaacttcttgttcaggtaaaaggtaaaatatcagttaatttatccacttttacaagttaaaaaatgaatagataagcaaaagttaaacacacactctcatgaaaacataattgaattatttctcatgctcaatcattttgcctcccatcgtctatttcttccttatttccttgtcttttcttcttctttgggtttagtttcaatttcagtgtaattacaatcattgactattaataatgagttttggccgaacatagatttttaaggacagctaaagatcataacaaaatcttgtcttgtccatacatgctttgtccaagaacttattatgtgtctattgctaaatttttatttaaatcaatgtctaattagcatcgaaaatcatacattcatttgatagcaacacatacaacacaaacgtttttgatatatacatctttgttataagttcatccatttcaaccccgtatattcattcaatctttcaacaaaaaattgaaagcaggaaaagaggaaatcattccattaactttaattgaaagtgtgtggcttaaacacaatcaaccaaatcgaaaataattaaatagatttacaccacaaaatttattttcgagatgaaatgcatcttggacaataaaagatttaaactttgaagcgacaaaaatgtttggtcatgatatcatcaaatcttatgttgcattcatacgtgtcaagttttaagataaccaaacaagactcactagtttcattggcatttgatatgtaatctacctcaacattgatcgtgttaactgttacatatttcttaaagattcatgagacatgagaaacacccttaaaaaaaaaaactagcatacaagacaccatttggaatggcaagaatcccaatcgatataagagagagagctcgaagagtcatggtacttgttttgggataaaataatctttgttgtagatcattctttagatagtgtaaaaaactttgagcaatttagatacacggaacaaggtgatttcatgtattgactcacaaggtcatgtctttttcaaaaacaataatggtttgaatggttgtgacagttaggacagacaaatccatttacagtttgaaccgttttaatttatcattcataaattatgtacccgcagagatgcagacctaaaaaattaaaagaaaatcgcacggatcaaccaaataccgtttttacatacgaatagagttagtctgtgacggtttgttgtccgccctaaaaaaacggaagaacaatatttataaaatatgtctaaaaattgtattttgcttcagtccccaaagagataaagcacaaccttattacgattttacatccactttttttttttttccaattctggctctgcatttcgttatctactaaataagctttttctttttatggtcaccaattttgcaagcaactatccaatgattcatggaaattatttacgtttgcagtctgaacctcaataaatgaaacatagtactcaaattgtgaaagtgaaagacatgttagagtggggttacaaattttgataaatggtactaagcaacaactcattaaaaactatcttttattaaagagacttcaatcaaataactatctttaaaaaataatcttacaactatatgtagtttttgaatttgagataaatcactcttttcctataaaaaaaatgtgaatcaaattttaaaaatagataactgttttaaacccacaacaaaccaaaacattcaactttgaagagacaaaactattgtctcctctgatcactacaaaactccatgactgcattagcaggagctctagtcttaagaatcatttcctcaaactcatcttctggacttgataatgcaacaatagctcctcctgctccaatggaagcttcatcttcatgtattattactgttcttatcacaatattcagatcaaacgtaccattatacgagaaatacccgattgagccagagtaaaggcctctcgaacagttctctagagaatcgagaatctcaacagatcttagttttggggcaccagtcattgaaccgccagggaaagcagctcttacacattccactggactaatatctgtttttttcagtccacggatcgtgctcaccattgtatgtactgttgtgtatgattctacatccatgaggttaggtacatggactgagccaggctcacagacacgaccgagatcattccttagaaggtcaacaatcatcagattctcggcttgattcttctcactgttataagacatggggaaaaaaacaacgttaaagtagcattgatgtgaacaattaagaaacattcaatgattctagaacaacgtgtttggtgtacctgagtttcaattgcaatttaagaaattcatcttcttcaggcgtggagccacgagctatagtacccttaatcggctttgcttcaagcattccatttctgtccagcttaagaaacctttcaggggacgaagagcataaagacagatttgcatttgagaagttgagaaatgctgcatatggtgctggattcctctctctcaggtggagataaagtcccaaaggatcagcatttcctattttccttctgttttgagtagtgagacaaagctcgtagctctccccgtctttgatatacttcatacagctctgaacatcgttgatatactgctctcgggatttgtcaggaacaaaacttgttttggattgagatgaatctataactggaagagtttgatcctccaactttcttgtggacaaacccatcaagctaatgagcttctcttcagtatcattcaggaaagaggtttctgcagttccctcttcgtaaagcgataatatataaacgtcatcgagttgatgatcaatggcgacaacattatccgcaaagaagaaacatgcatctggagcgttggatttgtgacgattaattggcattccacattccactttaatatcatacctacaatacaagaaaaggttattcaacattcattccagaagaaccaaattgtacaatagaaagccactaatggaacaaagcttgctataaaaaatcacagcctagatgatttaacacgtacccaatacaacctacgtatccaccgcaaaaatcaaaaggcaactcttcgaagtccttctcatcataagagatagatgaaagctcctggtaaaaatacagttgacattcactgatgagtctctatttactattgtataatcattttatttcactttctaaagaaaatataggctttcggcaagtgttggaataaatcaagtagttccattattaagtctttctgtataccttacggagaaaatcaagaaagccttcttccaagaattgtttctcagtagaactctgagaatcttcaatcagaagatgtcccgcatgttttgatgtaacctcactgaaaaaacaaagccatagattcaatgattcacttcccataatatgatgcatcattgttcagattatcccagccatatcaatatagtcggcgttcattggtaagaaaatgtgcaggagaaaggtttatggcgctcgagttaaaaaaagagcataaacctttgttggatagagaaagagtaggtcatgcgtaaaacctttgatcagataaactaaatgtcaattgcttccagagagatccacctttaccgcccatgaaagaaaatcgtcctctagcctggaacaatgtaattggaagaaacattctttagaagaaaacagtaatagcattaaactattgggacttcaggagaatagagtaccaaccttgtcactagaagaagtatccagccaaaaagtatcatttcctctattcttgccaaagagttccataaatatatttcttactccaccaactttatgcgcaagacgttcatgcttcttccatttcaacctcagcaattttgtatgtggttttggatatgatgaatccaccatatcaaagacgtctacaccatttgtcttggcagaaaacagagacttagggttcccaaaatagctagaaccatttcctgtacatctagttctagaaagttctttcagcaattgagtagcatcaggcacctgcatgtttgctaaagaatatttattattgaggagaagctccaagacagttcattacaaaataattccacaggttactaaaacaaaaataaatcttgaaatggaataatagaagaaagaggcggaaatgacaatctagtactaatgaaaaccattaagcttaaagtagctcaccagtgtcatttatgtttcttcgacgcagggatgtagatttgcaccgactccaataattcacagttatgtccttgaaatttttaaataactgactaccataggtagtagcaatactttctggatgaaactgaaaggacaaggcatgtcaaagagcagaacaatggaggaaacttattctaaatacaatctcatgtaaacatcaaacctgtaaaccataatggggaaaagaagaatgcatgatgcccatgagaatgtgtctatcttgtttcccattaacatgggacgaaggccaatgacttcgattttctaacttttctgaaacaggaatgacagatccgttcccaagtgggctcccagtgttattcacaggaacacaggaattcttctcagagaaagagccagtgtcatcataaatcgtccacgctattggtacaagttcctttggtagtgattccttatctatgatcagtgaatggtatctaacaacctgcagaatggcgcaacaaaaatttgttctctgtatctgagaagatcaatgaatgttaaatataaaaaagtagatgacctgccttaaaatcagagtttctcccggatggaatatcagaaaacaatatgttcccatcatgttcaatcccactacaagaagtagatggaaatggtgagtaaagtatctagcagacacttagaaatgagaaatggaggagatatgaccaaatataaacaacttaaagacttgtttcagttgacaaaaattcaaaaaagaaggtgattattataagacacagagagagcattagaaaaattcctgcatactaatcacatttttcaatacctcaaccgtccatggactggttccggggcatgcaccacatgagctccatggacataacctagtgcctgccaaaacatattgttttttacagagaactaagacgaaacactaaacaaatgaagtgcagccatctttatgaagataatattacctggtggccaaggcagacgcctagaattgggatatcacggcattcaagcaaaagacgaagacatattcctgcagagcaaaagtgaagaatgagaaatcatacaaactttcaacaaaaactagattaacttgctgatacctatatcagctggacacataggcgaaccaggtccaggcgatataacaatattatcaaaagcaacatcttcatataagtaatggtaagcttcttcccacgtccactcatcattccgaataacgacaggaggcactacacatcatacaaataaagagtttgaataagacatagaatccatctatagagactggcaaaagagaaagatagatgctatgaagttacctccattaatagtactcagagcctgatatatattgaatgtataactatcataattatcaatcaacaaagtcctcacaaaaccaagcttctccacaggttctcttctcggtaaactcttcttaacaaccgacaaatcttccaatttccctggcacataacggcttgacgccaaaaccttcctcgtagttttactacgacaaggtaaactaatgaaacttttcttccatttaggagaaaacagccgacttgcaacagaaaatctcagaacattctcacttggatatgataactcagaagatgttgaacaaaacgaaaaattcatgttcataactcctgtaccaaaagggagagagacacagagatttctcaaaattagggttctaatgtcacataatcacaaattcacatagctcaaaagttccatttcctaaacattatctctaaatacagtgaaatttctattcccaaatccaaaactataatccagattaatcaacgcaaagctacgaaaatggaattggaatcattagatataattaaatctctctacttaatctcctaagaacgatctacgaaatcaaacacaaacatctggaaaacgatagtggcagagaaacttacgtttagaaacgaagccaagtgagaagagattcaaaagcaacgaatcgtataaagtaagacaatggaagaagcttttgctttagctctgagaggaatcaatggtgaggaagagggaggaagagaaaacaaatggtgttgagagctttttataacctttatgaagaagaaaatgagaggaacaaataaattcataaaaatggaaataatttttttgcttttacaaatatagaaaggaatgttcaaaaaaacaacaacttgtaacacaatatatatcaagtaataatagtttcaattttacaaatcaagttttagaaaacaatattctttttttttggttttatggaatgttataatatacttatcttactctgctgttatagaagtctatcccctaaattacattaaaatgaatttttccatacaaaagtttttttgttagaacttatcatcaatattcactaaattctatgtataacatagaagagttatgctggaacctagttttcatataatttttttacttctaaaatttagaagaaaatcaaataacatatttaaaaaagtgattataaatattatattaatcttataagtaaacttataatactatatactttaaattatttataaaaccttcaaatttgtgagcagtaactcacttgttcttttatcaattgttatgttctaatggtgttttcattcaattctctctcaaatggtgggttacccggatacacactagccagagcttaatttgtccagattctccacaaatggtctcattcgaagaggcgatggacaacgtgaaaacatttaccagtgatttgaaacgtgagattaggctagaagattggaaatcgttttctttataaagttatggctaagaagttcaagaatgatcattctatgtttgagaatgttccacgaaggtatcagttattgactgggacgcaagattgggtgagtttcttgtaaaatctcatgagtagaagatgctcatggatttgaaaattagttggaagacagaaattttataattttatggaaaagaaaactgagaaaaaggtggcaatgtgtatgtgtttgatgagatcgtgaaggcaaacactaatcatcagaagcgatccaaactccaaaaacttatcagtgagaaatgagaggagtcaaaccttcatggatgagaagcgtcattacggattgatggaatctcaacttgatgagagcctcatttgtgctatttcattagtttcacgtgatactagcaaaacaaggaggctggtgaattggcatttgacttctctgtaattgctggagaggttttggatggtcttagctatccatctctatcatgtgtatgttattatgaaaatagtttgtacactttatgttttgggtggtacatataacatatgtactcaaaacttcactatagttacatgtaacaaagatatgttaaattctttattttcacctttctctataaactcattcaaaatgttgtttatatatatatatatatatatatatattgatagtaatatgaagtcaaaaatgatgtaatctaaaaaataattgtagaacagcacttacattatcttggaacgtagatactagttttctaagttggccaaaaaaaaaaagatactagtattctaagtttgagaattaaatttcttattaaatcatattatgctaacacttccaacacgtatttgctttcaaaatttcttttacaaatatcgtttctaggtatccagtttctatgcattgtgaaaatgtagatcgagactcgagaaatgtacaatgaagactaaaaatagaaagatccaaacttgtgttgccttagttggtggaaacagtacagaaacagagaggccaagatttggtgggaagtaagagagttaagtgaagactgatttaattcataaatgggacaagagttcatatatccaccacttcctcttcttacatttacttctctattccattacagttagaagttggaagacactaactacttcagtagcttgcattgaccaataagcaaatggtttccacaaatgtcgaatctatatcgaagtgtcttaaattctaagtcaaagggtttggttttgaagcctagatccatctttgaatatggaattaattgagagcaataaacaatcaaaacagatagataaaagacttgacttgtgaattaatgagacttgtattttagttccagaggcaaaactttctcttactgttttattaacatataatacaaaaactaaacgtcttcctgcgtttttgaggttgtagattcgatgtgagatcgagcttttttcattgcatcgaattcgggatcatctcagaaacactttaagttttctctatgttcattatataggtttttgtttatacacaagatttccacattcttccttctaaagagatcactacaatggaaacatcatcgtggtaccgtctccgttccccttgtggtatctcaagcagttcatggaaatccatacctagaaacatcaataagaaaaaagagttaacacttgatccaatacttcgaatcaaagatttctcttttcggttttcgatagattattaccagctttcttagcagcacggaaaagaagctcttgaaccaagtgctgagccgggtcaccttccggctgtaacgtgatgaatagttcaacctctgaaaccgcttcttcgtttgtgaaatattggtaaagaccatccgatgatagtatcagaaactggtctttcgagcctaatctatgatggtaaagtgatggcaaacaattgatgtatggtgacgtccctttgtaatcgatttgaaacatctctagaagcgcgttattccatttaggctgcaaacaaatatatctcaaagttaaaactagattgaaaaacagagtagtactacaaacattcttgcttaatttccattaacctaatgttcaaatctactctcactaagaatgttaagtaccgtacctgcttaaggaaacccgcaccgaaagctctagtgaccttcaacgaacctttaacccgttcattcgaaaccgcgctcgcatcatcaggatgctcctttcgaattctattaacttcctgcacaagaaacaagaattcatcagcaaaaacatcaccaattcatcgataaataacctcgttttatccgcatagttccttacctcttctacattagtgctatgatcaacagtaagctgaaaagctgataaagtcggaaccaaactagctccttcaccatcaccacaaccatcaaaatcattcatagtttcttcattgatacgttccaaatcttgtttaatcttcccaatccaataatcactctcagctttttgcccaagaacagctctactatcaccaacattcatcaaataaacatcttcacctttcatcaacattaccaaaacacaagaacccattaaagctagttcaggattttcgtcgagcatcatatctgcattctccaaataagcttcttccgtcttcctcaaagcttgtgacaaagctttcagtacatcagacgaattcggatccggatctagatccaacccattactccgatctttcagtaaacggtcaagatctcgatcccattcacatctccaccgtcgttgactttcttcccaattctttgactttttctcagaactcgagtcacgattctctacatcagcttcatcggaagattttgcatctgttttgggatcgtcccataacaatcctttaagctcacgatgaacggctggatataaatgagagagtaaatagtccggcgcatctggaccgttgaatccatcgtagattccaacgaaaagccatccatgttcttccgatacaaccacatgtacacgatcctcaccggctttaccttgtgcccattgaagattctggctctctaacgaaacgtcgtcgtctagtaaacttccttcactactaaaattcaagctattaacagtgagattattctcgatctgatggatccgggttttatccgacccgaatacccaatcgggctctttaaccggtttgatcggagcaacaatagagttctgtcctctagtaatcgtcttcgaaattgcacgacggagaacccgaactaaagatccttttctcgacccgacccggagattagctaaaccatgagagaaacttctctgaaattgatcagaaccggttttaccatcaatcggaccggaagaaccatcaagtggaccggacatgaaacctctttcaatcggaccggataaaaaccctctttctaaaggacccgaaccgggtacaatcggaccggaacttctcggaatcggttgcaaaggaatcgacgaaaacgacgtcgtgctttcgaacgcggcggctctatcgatatgtccgtaaggatcatagagagaagtagagagtggtgtggcggtgttagcactaacggaagcgccggagattgtacggaacgtcgtcgtttcttcttctgagtgaacttttgaagacgaaactcgtgtcgggtctggtctgacgtaacagaaagagtgtcctaacccttcgtctaaaggatctggttcgagaattgataactcgggttttttgttccgaccagcacctccggtcaaacatttacttagcttcccgattccgttacccatctgagaagaagaaaaaaagtttttcttttggagatggagagtttagatacaacgaaagtgtttttagattagagattgttgatccatggtagagagaaatgaagagacagaggttgaagaagaagatgtgagagagagagagttgacttgtgtgcaaggaaaatgatttttttgagtggaaattatataaagggaagagaatataaagatgtagaaaaatgaaaaatgagagatattattataatattattctgttatgttattgagtgttaaatataaaaaggaaaaacaaatttgtgaaagaagaaaagttttttttttgctctcttgacggagaagaagaagagggttgactagtggcgaaggcaaaggtcagggtgttttgaattgtgtgtatactgtttactctcgtaaacaagcgcgtatacgacacgtgcttattagaattaccgttagtagtttgcttttattatgtgagttcgaatttaaaagtattttttttctttgttgataaaggaaaatattgtagttgggggagtttctttttcttttgtggaattttgaattttgacagggtcaaaaaaggttatttagatggacattcaaagttttgaattgtgtatgtgttaaaattgtaaaaataaattattatttggatccaaaacttcttttgtatttgtgcattattttaatttaataacgtaaaatctcataaaaaaattttattcgattaattgtaataaaagtatattgtaacgtactttaaataaaataatatcatatatagtaacacaatattgtatttcgtttgttacaaattaaataatgtttataaacttttcaaatgttatggtttacatatttaataaaaaaaggttgatgtaaaatatttaacttaatttaactctagaaaaaaagaaaaattaaaaaaaaaaagcaaattgtatgaaagaaataaagtattgattttttttgtataaaaaatgtcaatacgacattattataaaaccagaaaaaatgtactgatgtaaaaatcgtttacaaaaaaaccgtaacatcattaagggacttattgtagtctcattatctcatagtatgtactatctatttagttgaagtaacttttaatcaaaaataattatagatcatatttgcgcgtgggaatgaagttgaactttccatcttaggaattataatctcaaaactgtggaaattttaccaaagaccaattaaggaaataaagagatctatgaatatagagacttttgttccttaagaaataaaaactctaaaaagtcaaaatagcttcaaacaaaccctttaacttaattttctattttcatattacttcttcgaaagttgtgcctacgatcaccgttggatcacgtgaatgtctaagcgagtgccacgtgtaagatgatcactgactcttcggttatttcataaattctcgtcaactctcgtgagattgcctcttccgcttactaccatcactctctctcctatgtcataaatattagtataatttggacttttattttcgtaattattttatattttgccaacgaaaaacttatttaatgctaaatgttttctttcgtaatgttaattttttcgttttttggagtgggtggtggtttatttatttatttagattttgtggttggaggttgtgataattactaatctaaatcacgccagcaggattcgaatgttggaatcatttctttttgtttgctattttatttggaagtaaaccaaaatgaacttatttatgattcatttcatgtacattacatttccatatatagtaatagtagatttttaatttacaactatatatagggtccgattggtgaccattatttcgaaaagaaatgggcacgaacaacatgttcctctttgttcaccaattttttctccaaatggtaacatgtagacctgacattattcctactcattccttatttttttagaaatgatagaagaaaattgttcatttccaaatttgatgaggaacaaacaagaaaaaattttaaatatttattaaaaattaaatttatgttcgttttatatttaatatttaattaaaaaaataatttatttattttttaatttttgttactatttattctatgtttttgttatcatttacagtaacatttgttctatttttcctctacacccattttttattactattttatcaaaaaaaattcatgtttgtttttttagtcatgttcctcttcattctttgtattcctttataggtcaccaatcggacccatagattctctattttttttttaagggaaagtatacattgcctcacacttttgaattttgagatttcaatatagcggataaaagtaaaaactttttctgttcaatctcaagtattttatttttgtaggaacaaaaacaaaaataatcccgaacacgagtttcttgcatactaaaccccaaacttcaattctatataaatatttaaagccaaaattttagacgtaaagttgacacgatttaaaagttgacacgatttaaaaaaaaacgttacaaaaccatatttttttgtgaaaagtaagactagctaattttgttgaaaaatccataggattttgaaaaaatctgttacaaaaccatctttttatgtgaaaagtaagaatatctaattttgatgaaatccatatgatttttgccaatccgttacaaaaccatctttttatgtgaaaagtaagaaccactatttccgttgaatccattttatttcggattccttctacatttggtttgtaatttttttcgagcgttaaattttgagttttttgatccgtttcaccaaaaattaagaaaaaatatgcaagctgtcaataaaaacatgtcccaagtttttctaaaatctctcaacttttaaatgttaaaaggaaaaatgtgtgtttacgtatatcaatatcactgcattatctttctttcttttttttttttggcaaatatcattgtattatctaatatacgaaaagaaaggatcaatttttcttaaaaaaagttgtctattaaaaacatttatagatttctttttaaaaaatcaatcgaaaatgagtataatgatttagaaactttctatactaaactttgttaaaaatgtaacgagaggtttttgttttggtatcctaaacaaaaaatctcctagacgtccccttaacatattttgcctttcttatgtatcgtttgaaaaatgtagagctagaaagtgagaccatgacctatctcgccaaccagaagattatgaaattttaagatcaagacttggtcacaaagataaatttatatattacataatttaattgattattcttcagtattagttgagccgttgccatataagaaacggtgtaaaaacattgtcttatagataaactgagaaggtaagccacaaaatgatgcatgcgaagagtgaaagcaaatcattgagaatgataaatcctttgttgtctttgcgcaaatgtttactttcactcattaaataattctcaatttgctttggtaataatcaagatctactattataacccttactgagtttaaagagttaaatcaatctagtatacacgtggtaactcaggggcaagtttcaaagaagaagaaaatgtcaaatacatttatcattagacataaagaattaaagaaaataatataaggaagagtgggtcttcccttattaaataattgcgttcatacttcaaagacaaaataaaaacaccaaaatgtatattttaacatgttgacaaaaaaaacatgaaaagataagtggagacatatccaacttgcgcattagctttttaattaactagtaaaagaaaagcatattaggtttttaaggttgagatttgttttgaagatatagttaattaacataaatgttgattttcaactttaataatcatttatcttaataacacttgataattcaaggtccatcatcatttgtaaattgcaagtggagaactctctattccctctccatgtatgcttccatattaaaatactataatgtaatgatatttctcattaggatatcttcataagaaatatatttacgtttatggagtttattttcaaaccttattaaatcccaagatgttctggcaaatacaattattgaaacagatggaaaaaaagtcaatgctatcaatttatgatttgaaccaattttcataaaacatgcagaacaatatactaaggttatattttaagtttcgtaccatccagaggaaactaaattaatgcatgattatatttacatgggtcaaattacttactacaagaactatttaataaacatccatgaagaaagtaaaaagtaaaaaaaaaatatagaataaagactacttgtttgcatcattgaccttataatatattttgagagagattgagtaaaaacactaatttgcttcttaaataatattgactttatgaaaacgaataaaaaattggattagtggcccttaatggtggggattagttcgtaagaataataagagaagtgggtcttttatgtcagtttattgatttggtggatctttatggctttgctggcactaaagtattgttgtcttgactcatcttcaacccacttctgcagtattatggaagtatatggaatatacatgttactctcctaaatttgaaactattattaagtttcattttattctcacttgtcattattagattatacgaatatatttatgcatatttttttatagacccaaacaagtgaagcacaaactcaagttagatagccatcttgattctttcctatagacaaactttagttcttgaagagatgtatatatagactatatattagcatttcttttctattttgattgcataaaatgaaattttgattgtagattactttatccaactagattggttagttaatgataagtattgcttgtggtggaagtagtagaagatgatagggagagagatattgagagaaggtagccattaagcaaacacaaatgcataagagtttgtttgttgcagacagcattgtcactttcatctccaccaccatttctctccactactttacatacttaagtgaacacacaccaagacacactcttacaccaacaacttcacgaatttcattttttaaattgtaagaatgtattgtatatatattaagcaattggcgccaagaactaaagtcgaagagacatattttagattacataaatgaaatgtattgagacgaatagtttattcactaggggatcggatttaaacgctaaaacaagtatatgtaattatggaacctgagtcctgacgatacggattggaggccaccggccaccacctagagacttatttttataaagactttgttaaataaatgtaggttgagacttcaatactaaggcccaaaattaaagctcaaagtctaatcccatctattcatcaaaagcccaatctattttaggagtttcttaaaagaaaattattggttgttctgttttacaataaatatttttgtttctaatatgcttgtggtattcaacatgtataattatttatttatgatttctaactataaccaaagattcatatactttagccaatttcctcatatataaatgggaaaatgtcaaaaaaatcacgaactttcaaatttaggacgattcaatcttgaatttcacggaagacaaataaatcgtaaagtttttgttcactttctaaataaatgataaagtttttgttgaattgtcattggagtcatgtcgttgagtaggttaacataattattttacggcgttaatgtctcgtttatctcctttgttagaacaaaacaacattgtttattgcaactcgttttgtccgttaaaacaaatttaaaccctaaatccccaaatcgatttcaatatctgcgattttgaggtcaaagtaagtctgtgattttgagataatgaaatcgatttgagaatttaaggtttctatttgtttcaaaagacaaagcgacgtcgttttattttttgggcaaagacttaattactctctctctttaactatagtgatagttgctaaatacacatcggacaactcgttatggttgagtatacacattagagagttttatagaaaccacaaaatcattactactctctatacaaattttcatatttcgaggcatttctcatattgaaaatagctaaattgcatatttaacgtcaacaatactcgaatgtattcatttcaaaaacactacattgttttttattattatttaaagagtaaacaaaggaatccacaccatatgaaccaaattggtccctaaaggaagatggagaatcagtagaaataatgattgttaacgaactgagaagcggttgcaagcgcgccaccaagaatggcatcgatcacaatagtgtctttgcctttcttaccaaccgctgagagcactgctcctgtcgccgcgcctgctaacattgcgtttttctgatacaaacaactcaaccaattagttctacaaaactgtaagaattgaaaagagtgtgaaaatgtattagtagtatacccaatctctgctgccacggatacgttcgattccgtattctgttccaatgtacactccaccagcagctcctgatcatattcatatgccacaaactttagacttttcttaatcactcaaaaatgagataaattagaaagcaacttaccccagtaaacaccttctttacacaacttcttaagctgcaacaatattcaacaaaaatttcagaaacttaaaaaaagattacacatgtcttcaaaccaaaacacatagatttgattcagtagtgtactcaccgcatgctccaaagtgctcttggagagactccctacaatatatgaaccatggagtaaaaaatgatattttgcagctccaacaaacaaaggtaattaatgataagcacaaaaacagatccatcaaaggtgtgtgctagttgttctatatatatacaatacattcttctatgcctttactaattcatcaacatcaccaaaaacacaacagtaaagttacataataaaactagacagaacaagaactaacacttatgtgttgtgtttgataaagttaagggcttacctttgtcgatggccttgtaagtgtcttctgcaagagatttagtgactccaacctaaaacccatcaaagaagaaaacaacaatgagaaacagatcacaaattaacaaaatgatccatcaaaaagagatgagtttttttacagctccgatcttgaggaaggcatcaacggtgagattgagaaaagggtttcccatgtccactgccaccgacagcttcggcgtgctaacagtcccggagaatgtgcttgaaggcatcttttcttcttctttcttcctctgtttttggttttgggatatttttctctttgatctttgcttgttctgtaacaagttcacctatttcttgggatataaaggggcttttaacggtggatattttaaactatggttcaacggtggagaagagattaacaaggacccacgacgagatatgtattgagcaatgagccagttaaatgacgacattgtcctcctaggctagagccatgccaaaaatccaacccacaagtctcgtgatctctttacaacgacacttgccgacgtgagctctaacttgccgacgtaaataatggaatagagtaaaaagacacaaattaacaccaagtatctcaatagtgttataacacaagcttgaaacaaacagaccaaaccagagtatggagagtgaaaatacaaagacatgtttcaacacaaatcaaatccaacatacaaagacatgtttcattattgtacataacattgataagagagaaatggagagtgaaaatggctcatatagatcgatttcctactctcgctctttcctgtgatgacgtttcctgctcttcttctcagaccgcttagaagaaccacgtccaacgcgtgaaacatcatcgcctgaaacatttgcttctgagtcagaagaagctgcgactttgttcctccgcttctgtcttctatcatcttcagaagactctgaatcagaatcatcagaatgattacgacggcttctccttctcctcttctcctttctactctttctcttcacacgtctgtcatcttcatcctcagactcatcagaatcatcttcatctctctttcttcctctcctctcctttcttctcttactccttccctcttcctcatcctcagactcactcaaactccttctcttatgcgaactccgcttcttcatcgacctccgccttctcttcctatctccagaatccgaatcagaatcagactcatcagaaacacgcttcttcttcttcctaaccgaactcgtcttcttaacactactcccacctttcttcttcccaaacctctcagcaataatcctctccatctcagaatcaacatcagaatcagaactctcactctcctcttcctcttcactactcacctcctcaacctcacctttaccaacacctctcctaatcttctccaaccccgacaaaaccgcagcttcaatcgcaccaggatctttctccttatcctccttagtactcaagaaattcctacactgaaacgtcaaatgcccaacacggccacacttcttacaagaaccacgagcctcatcgttattcgaacccgtaatcctagcaagagccaaaagtccctgaaaactcgcgtacgagttctcgggatcttcggttttctgttgtgtcgtcttaggctcttctttactagttggtgcataaggatcataaccaatcgcactctgccatattccatgagtctgaagcgctgcactactatgcacccgattgtttgcgggcatacgcactcttcctgctgtcgccggcatcttttcgaaaccctagaaaaaaccttcacaaacctaaaccaataacagagaaatatagattgattaatacctaaccaaatcaatatcttctccaaaatacaattacacagaaatttcacaacccaatgaaattacccagattaagctgaaatctagggtttcaagccccaaatcatcaaaagctcacatactaatttgccgattaaagggatagatcctaaatgtgaaagaaaaactcagagatcctagggttccaatcgatcctaaagagaaagagaagagtaaatagtttacctgattcgagtgaaggaatcgttaggaagaagcgacggagagagatggatgaagaaaaggttcaaactttgttcttcgccaatggcctctgaggcaaaaaggaaagattggaaagtctcgagggtatattataaagattgggaaatagttggaaccgccctttagcttttgttattttacatttatatcctccaaattttgtgtatttcatcatttttagttttgtcacataattcggctgggcctggctgcgttgagagggatttgggctgggcctggctgagtagttaatatgtgtttttcttttttactgctgtaatcatccatcatcaaatagtaactgaaacaaaaaaaactccagataaaaaacaaacaaaactgcgcattagcttaatttaaatttagttagttttgtgttatcttcatgacaaataataaaatgaaataaaaactcataacttgtttatgattaacctccaattaacaattttaattagctcgaatattctcctcttaatccttcccgccacattcctctccgcataactataactaaattgcgttaattcagtttttcaccagttcatcacacactaatcgtaattaacactataacaaaaaaaaaaaaaatccatatttaagaacatcactatgcatccccacaattcaataaactcaaatcaatttcacaaaattttccaataagccaatttaatttcttaaaataaaaaaatggcatcaagttgttgtggggattacgtggcggcggcgtcaccggagatgtcgacagtgatgggatcagaatcaatcgtgttgagacttctttgcgtcgtctttattatcctcttctacggttctattattctcctctgtttcgtaatgtacccgaagctaccaaaggaagaaatcggcgatgaggaagccggagagccattacctcccgccgtgagactcacgaaatgcggcggtggagacggcggagacggtgacggagttaaagctgacgtgtgtgtgatttgtttggaggattttaaagtaaacgacgtcgttagagttcttgtgagatgcaagcacgtgtttcacgtggattgtatagattcgtggtgtttttataagctgacgtgtccgatttgtagagctccgtttcaatggtttggtggtgattggtagagggagaagagagcaggtttagggtttaatgttcggtacgatccggtttaatcccaatttcgatatttttactgtctttgggatttagaaatttaagaggcgatcttaaagatttctctccgggtatttaaaactgtgatgtatgtgtacatatttataggaatggacactaccgattacggttttttttgtaacactataccgatcatggtttggtttcaaaatttgcggaaatctaaatttatgttattaattttaataagatcaaattatagaataacactttagggtatgttaataattttataaattttttagccttttgtatattatcgcaaaactttgaagataatacatgttaattttatcgactaacatacttttattcaaataaaattattattcggtcattcaaaatattaaagtagttaacaattatatgcattatacttacttagataattgtagaaaatataactaattaaacaattttatctggtttccgtatatctttacattttttctgttgtttggttttagatcttatttattggacaagtggaacttccttttcttcgtctctcctttcgttcttcctcttctttcaaaaatttcattgtagagggcaatgtggaactttaattcagttgatcaaaatagaattctatgtgtactagtactagtactaggtatatgtatatgatttgatgctgcttttgaggataacagaacatatgttttataggagtcatcttgaactaacaacttaatgtcgtaacttatcaataaattaattatcaacttaatgtggtaacttattagaagcacctaaagactcaaaacagtcttatatttgtttttctatgtttagaatctcaactttgaatatgtgaattgttttcgtaagatctttgcttaaatttttgtctaattgtgggtgatgatgttggtttcgatgaggttaaggatgacgagtctaattgtgggtgatgatgttggttttatgattctgatcaggatgcttctgatgaaggtgatatatataacatttccgtttattgtggattttgattctttgcttatttcacaataatcaaaattatttttctttgtattgtccgagtcgtttgttacataccacatatgtctcgtagtgttttatgggccgaagcctatcctccacaattgaggctacaaaggcacaacttttatggacctttagtcctttagtctttattttcgagtttgtttttgtatcatgaattcttctttcattagtcttgtcttcttttattttttgctaaaaacatttttttacaaaagaatttgttgttcatttttgttgataagatatgtcacattaaagggaaaatttgacaactctctctatacctaacctgcctcttaataatttcgatttcggcgttgacttttgtgcagacaaaactaacaaagtacatgtgaaccgtacggaataagcatcatcatttgaagagtcaagcatcactatatgttctacggtgacatcataacccactttgacatttgctccatcaatttgtttgacttttcattacattaatttctttctttctcttcgtcaacaccttccttgcttctagatgaaatcacatttgaagcttatacgtacaaaatcaatgttctagtatgttttgttgcgtttgacgtgatgatctaatttttaaaaaattgacttttcattgaccgagaaaaagagagagagtttattcatcctctatgagaataaccagtaaatgtagtcggatggtagctggatctgatataatggtgaatactgaatagaatcgtctattggaggaattgaaaaatcaaatctagaaaagtctaataactttgtcggaaacattttgaattaaccaatatatttgttaggagttgttatatactagtacgtcacaagaaaaatctagcttcgcattagtcaaattttttggttaatgaaaattaatctttgcagggtatactcataacagttggatagttaaaagaaaaaaaatggctaatatagtttcatgggattttgacatttttgcaattttcttacaaatggatgcattgatcaaagttatgcaatattcgtatgtggtaatatatataagctggtgtcgataattcctacacatgcaatagcttttttttttttgtcaaagcttaaaagcatcgaagtctattcttttcttgaatagtcacgagctaacatacaagtacatgcataatctgatattttacgatagagccgtgacaaaaagagaaagtaagaaagatattatacgatagaaacttggaaatggttgagaaccttaaaagtcaacaaccggccatctgcttatggaccaattattattttttctttatttatcattttagatgtcggatatataacgttatgcaacattttcaatttattttatttctaaagataaattttggttagacaattattacagaaaaatgcttacacttgcaaggttgtttgcagttttcaaagttaatcattaatcaggaaaacagtagttaaagtatatatatgattaatttagagattagtcaacaaaaaacacagtatcaagtaaatcggttttgttatcgtcatgaacaaaaaaaaaaacatttagtgcatgcaaaagtagaagaaacacttgtttgaacaatgaaatgtatgattggtaaaagtaaatttaagatagtatttttaacatgctgataagtgtatattctaaccaagcaaccaattttctttatatacgaagaaagaaatctttaatttctcgaagaccatattcgtataaaagtacaaccacaatttattttatatatgtatagtgtttaatcggtttggtttatttgaatcatccaaataatatactgacattaaaaaataaactaaaataaaataaaagagcattaattatttgaagtttgtcccactgcaatcaaagagtacaggtcaagtaaatcgattgattggtgtatagtatctggaaattagccttaatgttgtatgacatagaatggtccctttctgaacatcataactcagatgatcattcaatatctttgttgatttactctaatctgtgaaattaactaactataaaaaccagcatcatgttttaatctactaataaagaccattcaacatattaataaaatataatccgatggtgacgactgatgatcataatactagtagtaatggatcaatcaagaatcctctttaggttagaaaaatagactaataaccaattatagagttatatttaagctcaacaaaacccacaatagtacattctcgttggtttcttcttaatattatattgttgcttgttttgtaccaacaaaaaaagtacgaaccacacactttcgatcgtgattaggcttctttcaacaaattttgattagtaatataattaaactatcatcgtctacataacatatgttatccgtttcactcaacctatctatgttatctctttgcgaatctggcgcgggtacttcaactagtgtagaaagatactattcaaaaaaaaaaaaaaaatctaagatcacgagattaaacatgatatatatatgatgtttaacaataacaaagcggtttgttcaaaaaaataaagcggtgccggtatgctagagaggaaagccttgataattacgaccacaagttgtatgagaaaaattattggaaccttttgtatttcatgaccctgagaaaaattgaaaatttgacttaacgtggagtttgctagagaaaatgactcaacaaaattatatccctagctttgttttacgtcaaattgttactctcttttcagttggttcgctagtttgatttccggtattaagttactaaaagcacataatgatatttcagttggttcttggtaataagtttacacgagacttttgtggtattaaagtacataatgatcttttaattagatattattaaagcaaaggtgaaaaaagtggttcgtttactgtttttacaatgtgacgactgacaagaaacatggacgtgttaggttggatagatagctagatactatcacggggcattgtttgattctttctggcgaataatatacacttattttgttctttttatatataccaattgaatcctataatcaatataatattagtccactaaccacgagcactttttgcagattgactttccaacgatttataatagtaatatcttcataaagaaattcattagcattctacaattttcttcataaactggaagtgacaacaatcggacataaaaatgattcaacttttccatgacaatttttgtttctttggtgaagaaattaatcttttctaaataaactttttttattgaccaaaaacaatgtatcttttaaaagattgcacggattctatggttgaatatattctagatttagtttgtaatagcatatcgtcaactagacataagtctatattcctcactagctcgtgttcctttcttctttcgtcacggttagttcagatccggacaagaatcctggattgacaaaattttggaaatggcttaattaaactattgttttatctttcttacaattctttgaaacggtgatatttcatataaaattctcaaaatttttaaattagtgtcgttaaattctgtattagcagctcaaccagttaaatataaagccacgttttgagagaatcggattatatctgaaattcgataccagttacgaagattatattacatttgattttgaagttgtaagataaaaaaaattagtgtcattattgtatgaacttcgtgaagtttatttatgtgcttcacttttagttaataatgtaatatgtataacaaaaacaaacttgtatgcctatatttagtacaggtggattgaatcgtatcaatgtcacgtaaaagttttatttggtttaatgtctcacgtaaaagttgcttttacttttcaggtgcctagccgtgttcagaaatcagagaccaaaatcttatgggggcaatatgatcaaatgtaatataccaacagttagttaatgcggattgttgacaaagaagaacatttcatgatcggatattgttgacaaaaaactactgtaagccaaaaatgaacaaaagaaattaatgataattaagtataagacttgacaaaaccaagccgacatgagctgagtcaagttcatgtcgtcaatgttatagtgatgattgacgaatatccaacggctgagaatgattggaccgcagtggaatggacttttaactataaaatgggacgaattattcatgattgcttaattgaaaattcacattgttattttgttatttatttatcattaaaactctacttcttttctcttttagtcagttttgataaaattcaaaatttcgtttgttacaatttgaatagtattttaaaatcaataacatcttttttttgtcattctaaataattaaaactcaaaataataatttttaaaaaatattgtttatatatgtgatataatgtggtaaaatacgaatcaatatattttcgtataataaatttatattccttataaattatcgtcaaacttcatattaccaatgtttatttttgggttaaaatctcacactattttttttttatacttcaaaactcatatattttttgaacaatcatgcctccaatatagaaaaaacaaaattgacggatacaaagaaaaaaaaacaaatttgacattgaatataaatgcaaatatttttttgaaaaagtagaaaaaataaaaagaagatggggtttaaaggcgggaccggtccgtcatcaatgccacctccctaactcctttctctttctctctttcagctacttgcaacaaaattgcaaaattgtcgacagaaacttctctcaaatttagttcctttctcatttatccactgctcttaatccaacttcaatatctctctatcctcacaatatttgttctgtttctccttcaactttcaactgataaagtttaaacctttatgctctttactctctgatctcaaaagggttttgtttagttctcctcaaaaccatggggatttgcttaagtgctcagattaaagctgtgagtccaggtaagccaggtacttcaagcttttaaaaataattttccaaacattactcatgcaaaatgttgatttacttaagttttgaagttttcattttagttggtataaagtagggtcttaattagattttgtttgctaattttattttatttagtttttcaatatgaggttaggttttttggtggttggaggataaaatgacttaacttaaaagttaggcttaatgttttgacaaatctgtcaaaggttttcataataaattgattaattatctaaagctttgtcttttttttggtgtttggtttaattcactccttcatcaaaatcaaaaacaaatttacttttgtctgatctctaaaaacaaaaaacatgaaaatgggatttgtcgaaaaagtgaagtctaacgtttttttgtatgcaaactatgtgtttggttgttgtataggtgcaagtccgaagtatatgagctcagaggctaatgattcactgggaagtaaaagctcttctgtgtcaatcagaacaaacccaagaactgaaggagagatcttgcaatctcctaatctcaaaagtttcacttttgctgagcttaaagcagcaactaggaattttagaccagatagtgttcttggtgaaggtggttttggttctgttttcaaaggttggattgatgaacagactcttactgcttctaaaccgggaaccggtgtggttattgctgtcaaaaaacttaaccaagatggttggcaaggtcaccaggaatggctggtaagttgatcaaattcaatctttttgaagtttgacaagatttttgaagtttgtttaatgtttctttgattggtgttgttgttgttgtaggcggaagtgaattacttggggcagttttcgcatcctaatcttgtgaaactgattggttattgcttagaggatgagcatcgtcttcttgtttatgagttcatgcctcgtggaagcttagagaatcatttgttcagaagtattgtttatttttctctcacactcttgtcgattttcaagattcgaaaaacgtttcgagtattcaaactttgtttcttgtggttgcaggaggttcttattttcaacctttatcttggactctccggttgaaagttgctcttggtgcagcgaaaggtcttgcgtttcttcataacgccgagactagtgtcatataccgcgatttcaaaacgtcgaatatactgcttgattcggtataaatttcttgatgaaaaaaaaaaaactatgcaagaaggctttatgttaaccatgtctttgacatgatcacaggagtacaatgctaagctttctgatttcgggctagctaaagacggtccaacgggtgataaaagccatgtctctacgcggatcatgggtacttacggatacgcagctcctgaatatcttgcaactggttagtctcaaaagttatttctttaaatgatttgaatgataaacttttttctgatgaccactgactctttcactttccttaggtcatttaacaaccaaaagtgatgtctatagctacggtgttgtgcttttggaggtgttgtctggacggagagctgtagacaagaaccgtccaccaggagagcaaaagctagtggaatgggcaagaccgttacttgctaacaaaaggaagttattccgagttatcgataaccgtctacaagatcaatactcaatggaagaagcttgtaaagtagctactcttgcgctgagatgcctcacattcgagataaagctgagaccaaacatgaacgaggttgtttctcacctcgaacacatccaaactttgaatgaagcaggaggaagaaatattgatatggtccagaggagaatgcgtaggagaagcgatagtgttgctatcaaccaaaaaccaaatgcaggttttgctcgacaaactgctgtaggcgtcatagctactgcttatccacgcccgtctgattcgcctctgtttgtttgagtacgaaacgatgaatgttctctttagttcggatgtacagttttgtttctgcttgtgtaccgaaaggattctcagttcatggctcgtttacacgactcagagatttgacaattgatctttgtagtgcgagaattgactaacataagtataaatgatctcattgtcttcaacttcaagctctgttagtgttacatgtaaagaagaaataagaacaaagaaagatgctttcaaacatatacataagcaaatgcttaagaagtttatatacagtgaagacactatttctactaccatgttctgaccagtcctggtgtccagtttcgccagtctagcttcgaaagcgacttgtttaagttcatcttatccctaagatcaagaaccttcttacgataactactaccttgcttctttagctcaggctcactctctccattgagctcagctttgattatctcttctgtttcatcagcaactggcggaggaacgttttccgcttcttcatcgatgatgcgtccaagtagtgatacgacttcgctcattttaggccgagatttcggttgcttcattagacatttgtttgctaaagcagctactctttgaacagacttcatacagtagtactggccttcgagccgtggatcgacaatcagatggaacttcttcgagtctgatacataaggcttcacccattctaaaagcttctgttcacctcgaggtcgatttctatccactgctcgtcttcccgtgatcagttcatacaacactaccccaaagctccatacatcactctttgccgtcaatttcccggtttgtacatactcaggagctgcgtaaccaaccgtacctacaaccttccatacaagacaaagttaaagacttcaagagatgttatgttaaagagtgctccaatagagacatactgaagttgagacatgaccaagtccttcaggaggtccttgcctagctaatccaaaatccgagagctttgcaccgaatctctcatcaagcaagatgtttgaagacttgaaatctcgaaatatcaactaaaagatcaacagaagcaaattcaaaaccaaaacacaaaacactcttaaatcatataaatggcaatgaaatgcttaacctgaaaatccatttcttcatgaagataagctaagccttgagcagcatcttgcgcaatcttcaacctcatcatccacggtagagataccgacacaactcggcctacgagatgatcctccaagctcttattacacataagttcatagactagaagcctttgcatccctctttcatcatcatcagcacaatacccaactaacttcacaagatttggatgattcactactcctagaaaattcacctcattgatccattccttatgcccctgaacactagaacaaagccacacacacaaaccaatcacaacacataattcaaaattcaatcacaaaccataaagtaaagtttctccttttaagttcaaatttggtagtagctcactaaacttgaaactttaacagagtcatacacacacataacaacagacccacttcgagaaatcaatcacaaaccacaaagtaaagtttcttgaaccaaactggctcaaagttgaaacattttcgagactaattgaaagcagaacagagtaaacaaaaaaagattagagtcatgcctgtaaaccttgacgattaagctgtttaacagcaacattaatcttcgaatcaaaaccattagagtctgaaacatcaacaacacctctataaacgcaaccaaaccctccttcgccaatcaaaagacctctattgaaacctttagtagctattttcagctctttgaaagtaaacacctttagatcattctcaggaacaagtccaccgatccaacgttgacttaatggcttgggaaaagtaagtctttccggtgagaaactccagtctgagtcaaactcggaccggcgagttgggtctgaagtggtggatgatgctacgcttagagaacgagcccatgagagtcttgaagctcttgaaacaacactgtctcctcctcctactccttcttcgattgttgttgttgttctcttgtcgccattggtgaagtgaaaacacttcatgttcttcttcttccccaaatccgaccgagtcaacgaaaataaaaatggtgactttttggaagaagatgatacactttgaagatggcttatgatctgatgtgacaggttttaactcgtagttgatgacgtggcgagttaagaatcgtcgattccgagagatctaaaatttcttgacttgacctaactttggtataagtactacagtaatagtcttgctcagaacgagttagtcgcataaatgttttttttttgtgtgtgtgatatagaaaattcgattactaatagtttacatcgaccacattaatgaatttaaagtaaaaaattctataaaaataaataaaatatatttatctattaagtagtaatgcacgagttttttttaggtaaccataaatatacatataaattattttctgataagaatattattcatgaagcaccaagattttgaaccagtctcgacgattgaccaactttgattagttctagttttattgttgttgttagttgatcggtcgattcatttttatttttctcacctaactaactttcgtatatggaacatggacatttgatgggcctttctcggacttcacttttaaaaattctgattgtatataggtcagagaatacatacataattttgatatgttaatttaaataatgcaaacttcatttactggtttcaaacatcagttgataattatgtaaataacatgtgagacattttgtagaaaaaggaagaattttggccaaaaactgttatgctatttacaaactcaaattgtatcttggaacagtcaaaactaagccaatataactcagtccaaagtttaactcatcaaaacaaatgttttctccatataagaggaatggggaatagatttctccatgcaagaggaggattgtagcaaaggtttctcataaataaaaaagaaacacatattagaggtttgtttgtagttaggagaaataatagggacttttggtttctagtaaatttcacataaatgttctacacatcaatgaaattatattgttcacacacgagcaaagaaattgatttagtataccaaaaatgaatgtacaaataactaaaaataaatagatcacatatagagatggctagttaggtttttacaggcgtctttcacatctactgccattatcaaaagaaaactttcattaacaatccataaacttttttaccatcaaacatcatataacatttatatttttgacgtcacattcataacaccactattcacacttccattgatgatcatgccatcgtagattccacggttggtgcagttgaagtcacgccacaaacagacataatgcaagatccgatgtttgcgacattggctggtgagggaggaggtgtgggttattgggttattgaaagagtttttccaaaatttggttatttgttagatacttttaccgaagaaatgattgatgacttattaagattttatatctacaaaatatttacacatatttacgatattgtttacaaatttctcattgaaacctaaatttcatatttgtttaaagtgaatggaagagactatagatgtcctagggagggaacaaaaagaacccaccacccatgtgcgaatctcgtcttcttctttctactcgttaagtacccaatggaccttcctcgttgatgtgactctcatatatagcttctttccgatttcacccttttttctatctattccctcctctcttttttccatgtacacatttaaactacaaaaattgatgggaacatgaaaatggattatacaaagagcaacccaaatatttttctttctttagttagtttgatcagtgacaagaaaacaaaattatataggtgaataataatttgttaactaaaaatttggaacgaaattttgagcgtgcgtctttattaattaccagctaaactattttatataatatttttgataaatactacaataataattaacaagttaataatgatgtaaaagtctatgatgcatgctcatatagtgaaacaaaaatatttaataaaattacatgtcccacctaataaaattattagaaaaataagtcttaatttttcttaattttcatcatatgtattgtcgcataatacaaatactattatctaattcatgattttttttgatgaaaaacgtttcaaatatattataaatacatgcaaaagctatttatattggatggtatgggtttggctcaagaaagaaaaaacagcaggcaacattaaatacttttcgtgattacatctcattgcttgtgtacaaaatttcactatcatccattttgttttaggcttttaaaagaaatcccataaaatcccatgattcttcttcttttattttttcttatcatccacactattccacccaacctttttctttagataactcaaatatttatggccaatcaattaatttcctttcttttattctaactttctaagtatagtaaccaaccataagaattgaatacccccacccaaaccactttaacataaccgaaattaaacacccttattcttaagtataaaaatacataataaatgtcaaacaaccattataaacaaatacagaaaattgaagcaatttccataaaagagtagaatataacctctctatcatttcagaagttttttccatttaatatcaaaatttggtttgtaacaaaatgatgtttacttttcagaaaaaaagaagataataaaccataaacatacacacatttatatataaattacaatatggagttctacaagaagcattacaaacacaactattactgcttcttttactataatacgctgaaaccagaagtactcttcacatctgcttcacagctccttctactttaaacaaacttctaatttcacccctaaagattacacatttaacattgaagaactaaaaaaagacaccactgtcccacgtttcacactctccaacgaacacatcagtaaaaaaacacaaacccatgagaggtaagaaaatttggaattttagtggtctcttaaaaaacataaatatatatattaaaatttctcaaattactaatgccttcggctggaaattttaatagtaataatgaaaatactaatattgatagatgagtttccgataatgccctcagactctgaagttctttcccatgaaagtctgaccaaacttccaattcgccggagcaatgttccacgacgtcgagcttctacggtcactgcttgtgactctaaaagaaagtgactgaccaaccaaaactgagttagattgccagttttgtccccagttacgactcatggtcatccacgaagtatgtgttcctttcacacctagccgcactatgtttccggcgccagcgacgttagtgactagaaccaagttaaaataacggaaaccgttgattgtgaaccttattcctcctctcttccggcatggcactctgttgtgaataaaagaaacaatacaaggttagttatgtcatttcagtgaaaagttgagaaaacgcgttgttgactaaaagacaccattccattattgtaactcttgacttttattatatggtactgataaaagtaaaaaagaaattgttggaaggacagtttcgtctttttgcagaaaataagatcttttagatttggtaatttagccaagtacgagagacccgacataaatgctgcaccggctcgcgccaagaatcaaaagacaagactttttgaccgtacccctatacttctaacatattatgtttgacaccctaaatgttttaattctacaacattaaaccaaattattcagaatctataaaaataagacttatcaactacaccataatatttataaatgttatgtttgatactctaaacttctagttctgtcggcattaaccctaattgaacagaatatagacgcaagacttctcgactagtaccctaaaacttttaatcctgccacattaaccccaatcatttgacccaatacttctaagatgttaatttcataccccaaagtttaaaatctatcaaattaactccaatttgtctttctcaactaaacaaagcctaggtttaagctgatatataagattccactgaaacaataaattactcttcttaccggcggaaagagacggggacgattccggcacgatactcagcgatcttgagaaacataggcatagcaagatcaaagtgaggtctaggagggttacaccaaccaccattgtcactaggctgagcaaagttcggaggacagaaattagtcgcagtgatgaagattgaaggactaccagaatggcaccattttggatcactagcacatttgagctcaaaacaagcaccacagctaaaaccattgttgaacagagccgtgcttaaagccgccgtgttcacaccatagccttggctgtataagttaccataaccacaagctcctcctgaaaacaaaaaacagagcaaaaccgttaatttgacaatgtggtggtttggtttagcatagatgaacataaagattggatctttaaggtacaaaatcaagattttaacattttcacaatgtggttaccaaaaaagattggaactttaggttgatgagaatgtggaagagaagagagagagggagagagacatacccattgttccagaagcatcagagccaccgtagaaagtggcgtgagcagtttcccaaccaccaccattgtaaactcctgggattcttgcttcagacaatgcaagaattgtagtaagaacagataaaaccaagcccaacattgccattatctgagagagagactgagaaaatagagagagattgggagaaatgggcagaggaggcagaagaagagtttattggagtgtctccatgtgtgtagggaagggtatagagaggtgactatatataaattgggacttaagcatttatttatttctcttgctttgtattattctctttctttatcattacaaaagtttaacctctaggggtcatagttctctagcttatgaatagagattactaaacacgatttgggtttttgacaaaagttttacaattatttgtatgtgtaaaaaaagtcatgcgtacaaatccataattaaatgtttggtgtatgccctttccctcaatgtgtctctaccaaaatatagttattgctaagaccacttgcgtttagtaacgtgtggttcacactgcccaatcatagttcatagtgtacggataaagatgatgttatatcaccactaaaatctgataaagatgttaccacgctccattgaagcgcgttgggacgaccactctttagttgctatcaaaatttttgcgccctttaaaattgctatatcgtctctggctatggacctatgataactattgatgtgtattgaatttaagtaatacgaatttggtattctagtaatggctatgttaattttagtttctaaagaaacggttatagcttatgatcatggttattagtttatatcatcatttcggctattggacttatgtacagtaaaaataatattttctttatcatatatttaatgcaatttggtaaattttacattatctttcgccaaattattcaatttttatatacgcaaaaagctagacctcaattcacttttttttttctttgctcaaaagagaattgtaggtggaaattcatattattttttcgagatcatagaattttgaagtttcttgtctgaaaacgtttatggatggccaaaaataattaaatgcagtagaagagttcgaagtgaataactgaatatggacacttaactactaaaaataacataagtatatatttttcggtattatcaaagaattggaaatattttatttttgtatttataatgttctaatgatgtagatattacgtaattatgatgaaatattttatagtgttcacgggtgtacgagttttctacttgatacagtgaaaaatactcatggaaaagtcccgctacttaaaaaatatacattagcataaagaagttgttatagtaccttaaattaaaatcaaagacaaaattattgttttagtatcacacctaatacctttcttaagcataatttcccctttgttgcaagatacatgattggtcctccgtacgtaacggacataagaaaaaaatagagagagggtacgtcacgtaccgtacgtgtatgttacttggaagctaaattaataacaattatcaaacttcgtgaatcaaagtttgatacgccctaaaaaattcacacgtaaatatcactgcaatgtgatttcgagaactaattcaacttttgttgtttgtaaattaggatcaagctttccaaccataattattttaagttgagatcctatgtttggagaatctaaagattacaagtaatatgaattgatatacatgagatctttaatctaagtactccaacatgtcttctctagagaccaactttggcacacattggagtaaatttggctcgagacaatggttttctcaacattaggctacatgagcaacaagaacgacaccggattgaacaagtcctcgagtaacaaccctaaactggatgcaaaaaattattatggatatctaaacgaacaatgagttgtagaatataatggataaaactgaaacaaatgaattactattttgaaaaatgttttaatgcatcgttaatctatgttgtttttcatatctactctatttttttttcagtcactaattttaaatattaattcaactaatactcatatacgtacaaaatcagacatgtgtggtttggtaagagtaggactatacataccatctagaattgagatagattgactaacaaaaggagataacctaataatatgcaaacattgtcacattttatatcatcttatacttaaaaaacaaacccatctttgacgaatttagcctcgagtgagtatgtaatatgtatgattgaagaaggctaggattggatgatgagtgatgactaacataagggaccaccacatggaatcctatcaagtgtacttgtccgacgtataactttgggacccttttgattaccgtaatcaccggagcatgtaaaccggtgaatctttgtttaaactgaaacattaaaattactacataataagctcaccacctaaaaaacgaaactaatgttaatactttaatgtttcttgaaatccaaagacaaattgagaaaaatactgaattc

SEQ ID NO: 303 - DNA, 108393 bp, Arabidopsis thaliana
tgaatactgaatagaatcgtctattggaggaattgaaaaatcaaatctagaaaagtctaataactttgtcggaaacattttgaattaaccaatatatttgttaggagttgttatatactagtacgtcacaagaaaaatctagcttcgcattagtcaaattttttggttaatgaaaattaatctttgcagggtatactcataacagttggatagttaaaagaaaaaaaatggctaatatagtttcatgggattttgacatttttgcaattttcttacaaatggatgcattgatcaaagttatgcaatattcgtatgtggtaatatatataagctggtgtcgataattcctacacatgcaatagcttttttttttttgtcaaagcttaaaagcatcgaagtctattcttttcttgaatagtcacgagctaacatacaagtacatgcataatctgatattttacgatagagccgtgacaaaaagagaaagtaagaaagatattatacgatagaaacttggaaatggttgagaaccttaaaagtcaacaaccggccatctgcttatggaccaattattattttttctttatttatcattttagatgtcggatatataacgttatgcaacattttcaatttattttatttctaaagataaattttggttagacaattattacagaaaaatgcttacacttgcaaggttgtttgcagttttcaaagttaatcattaatcaggaaaacagtagttaaagtatatatatgattaatttagagattagtcaacaaaaaacacagtatcaagtaaatcggttttgttatcgtcatgaacaaaaaaaaaaacatttagtgcatgcaaaagtagaagaaacacttgtttgaacaatgaaatgtatgattggtaaaagtaaatttaagatagtatttttaacatgctgataagtgtatattctaaccaagcaaccaattttctttatatacgaagaaagaaatctttaatttctcgaagaccatattcgtataaaagtacaaccacaatttattttatatatgtatagtgtttaatcggtttggtttatttgaatcatccaaataatatactgacattaaaaaataaactaaaataaaataaaagagcattaattatttgaagtttgtcccactgcaatcaaagagtacaggtcaagtaaatcgattgattggtgtatagtatctggaaattagccttaatgttgtatgacatagaatggtccctttctgaacatcataactcagatgatcattcaatatctttgttgatttactctaatctgtgaaattaactaactataaaaaccagcatcatgttttaatctactaataaagaccattcaacatattaataaaatataatccgatggtgacgactgatgatcataatactagtagtaatggatcaatcaagaatcctctttaggttagaaaaatagactaataaccaattatagagttatatttaagctcaacaaaacccacaatagtacattctcgttggtttcttcttaatattatattgttgcttgttttgtaccaacaaaaaaagtacgaaccacacactttcgatcgtgattaggcttctttcaacaaattttgattagtaatataattaaactatcatcgtctacataacatatgttatccgtttcactcaacctatctatgttatctctttgcgaatctggcgcgggtacttcaactagtgtagaaagatactattcaaaaaaaaaaaaaaaatctaagatcacgagattaaacatgatatatatatgatgtttaacaataacaaagcggtttgttcaaaaaaataaagcggtgccggtatgctagagaggaaagccttgataattacgaccacaagttgtatgagaaaaattattggaaccttttgtatttcatgaccctgagaaaaattgaaaatttgacttaacgtggagtttgctagagaaaatgactcaacaaaattatatccctagctttgttttacgtcaaattgttactctcttttcagttggttcgctagtttgatttccggtattaagttactaaaagcacataatgatatttcagttggttcttggtaataagtttacacgagacttttgtggtattaaagtacataatgatcttttaattagatattattaaagcaaaggtgaaaaaagtggttcgtttactgtttttacaatgtgacgactgacaagaaacatggacgtgttaggttggatagatagctagatactatcacggggcattgtttgattctttctggcgaataatatacacttattttgttctttttatatataccaattgaatcctataatcaatataatattagtccactaaccacgagcactttttgcagattgactttccaacgatttataatagtaatatcttcataaagaaattcattagcattctacaattttcttcataaactggaagtgacaacaatcggacataaaaatgattcaacttttccatgacaatttttgtttctttggtgaagaaattaatcttttctaaataaactttttttattgaccaaaaacaatgtatcttttaaaagattgcacggattctatggttgaatatattctagatttagtttgtaatagcatatcgtcaactagacataagtctatattcctcactagctcgtgttcctttcttctttcgtcacggttagttcagatccggacaagaatcctggattgacaaaattttggaaatggcttaattaaactattgttttatctttcttacaattctttgaaacggtgatatttcatataaaattctcaaaatttttaaattagtgtcgttaaattctgtattagcagctcaaccagttaaatataaagccacgttttgagagaatcggattatatctgaaattcgataccagttacgaagattatattacatttgattttgaagttgtaagataaaaaaaattagtgtcattattgtatgaacttcgtgaagtttatttatgtgcttcacttttagttaataatgtaatatgtataacaaaaacaaacttgtatgcctatatttagtacaggtggattgaatcgtatcaatgtcacgtaaaagttttatttggtttaatgtctcacgtaaaagttgcttttacttttcaggtgcctagccgtgttcagaaatcagagaccaaaatcttatgggggcaatatgatcaaatgtaatataccaacagttagttaatgcggattgttgacaaagaagaacatttcatgatcggatattgttgacaaaaaactactgtaagccaaaaatgaacaaaagaaattaatgataattaagtataagacttgacaaaaccaagccgacatgagctgagtcaagttcatgtcgtcaatgttatagtgatgattgacgaatatccaacggctgagaatgattggaccgcagtggaatggacttttaactataaaatgggacgaattattcatgattgcttaattgaaaattcacattgttattttgttatttatttatcattaaaactctacttcttttctcttttagtcagttttgataaaattcaaaatttcgtttgttacaatttgaatagtattttaaaatcaataacatcttttttttgtcattctaaataattaaaactcaaaataataatttttaaaaaatattgtttatatatgtgatataatgtggtaaaatacgaatcaatatattttcgtataataaatttatattccttataaattatcgtcaaacttcatattaccaatgtttatttttgggttaaaatctcacactattttttttttatacttcaaaactcatatattttttgaacaatcatgcctccaatatagaaaaaacaaaattgacggatacaaagaaaaaaaaacaaatttgacattgaatataaatgcaaatatttttttgaaaaagtagaaaaaataaaaagaagatggggtttaaaggcgggaccggtccgtcatcaatgccacctccctaactcctttctctttctctctttcagctacttgcaacaaaattgcaaaattgtcgacagaaacttctctcaaatttagttcctttctcatttatccactgctcttaatccaacttcaatatctctctatcctcacaatatttgttctgtttctccttcaactttcaactgataaagtttaaacctttatgctctttactctctgatctcaaaagggttttgtttagttctcctcaaaaccatggggatttgcttaagtgctcagattaaagctgtgagtccaggtaagccaggtacttcaagcttttaaaaataattttccaaacattactcatgcaaaatgttgatttacttaagttttgaagttttcattttagttggtataaagtagggtcttaattagattttgtttgctaattttattttatttagtttttcaatatgaggttaggttttttggtggttggaggataaaatgacttaacttaaaagttaggcttaatgttttgacaaatctgtcaaaggttttcataataaattgattaattatctaaagctttgtcttttttttggtgtttggtttaattcactccttcatcaaaatcaaaaacaaatttacttttgtctgatctctaaaaacaaaaaacatgaaaatgggatttgtcgaaaaagtgaagtctaacgtttttttgtatgcaaactatgtgtttggttgttgtataggtgcaagtccgaagtatatgagctcagaggctaatgattcactgggaagtaaaagctcttctgtgtcaatcagaacaaacccaagaactgaaggagagatcttgcaatctcctaatctcaaaagtttcacttttgctgagcttaaagcagcaactaggaattttagaccagatagtgttcttggtgaaggtggttttggttctgttttcaaaggttggattgatgaacagactcttactgcttctaaaccgggaaccggtgtggttattgctgtcaaaaaacttaaccaagatggttggcaaggtcaccaggaatggctggtaagttgatcaaattcaatctttttgaagtttgacaagatttttgaagtttgtttaatgtttctttgattggtgttgttgttgttgtaggcggaagtgaattacttggggcagttttcgcatcctaatcttgtgaaactgattggttattgcttagaggatgagcatcgtcttcttgtttatgagttcatgcctcgtggaagcttagagaatcatttgttcagaagtattgtttatttttctctcacactcttgtcgattttcaagattcgaaaaacgtttcgagtattcaaactttgtttcttgtggttgcaggaggttcttattttcaacctttatcttggactctccggttgaaagttgctcttggtgcagcgaaaggtcttgcgtttcttcataacgccgagactagtgtcatataccgcgatttcaaaacgtcgaatatactgcttgattcggtataaatttcttgatgaaaaaaaaaaaactatgcaagaaggctttatgttaaccatgtctttgacatgatcacaggagtacaatgctaagctttctgatttcgggctagctaaagacggtccaacgggtgataaaagccatgtctctacgcggatcatgggtacttacggatacgcagctcctgaatatcttgcaactggttagtctcaaaagttatttctttaaatgatttgaatgataaacttttttctgatgaccactgactctttcactttccttaggtcatttaacaaccaaaagtgatgtctatagctacggtgttgtgcttttggaggtgttgtctggacggagagctgtagacaagaaccgtccaccaggagagcaaaagctagtggaatgggcaagaccgttacttgctaacaaaaggaagttattccgagttatcgataaccgtctacaagatcaatactcaatggaagaagcttgtaaagtagctactcttgcgctgagatgcctcacattcgagataaagctgagaccaaacatgaacgaggttgtttctcacctcgaacacatccaaactttgaatgaagcaggaggaagaaatattgatatggtccagaggagaatgcgtaggagaagcgatagtgttgctatcaaccaaaaaccaaatgcaggttttgctcgacaaactgctgtaggcgtcatagctactgcttatccacgcccgtctgattcgcctctgtttgtttgagtacgaaacgatgaatgttctctttagttcggatgtacagttttgtttctgcttgtgtaccgaaaggattctcagttcatggctcgtttacacgactcagagatttgacaattgatctttgtagtgcgagaattgactaacataagtataaatgatctcattgtcttcaacttcaagctctgttagtgttacatgtaaagaagaaataagaacaaagaaagatgctttcaaacatatacataagcaaatgcttaagaagtttatatacagtgaagacactatttctactaccatgttctgaccagtcctggtgtccagtttcgccagtctagcttcgaaagcgacttgtttaagttcatcttatccctaagatcaagaaccttcttacgataactactaccttgcttctttagctcaggctcactctctccattgagctcagctttgattatctcttctgtttcatcagcaactggcggaggaacgttttccgcttcttcatcgatgatgcgtccaagtagtgatacgacttcgctcattttaggccgagatttcggttgcttcattagacatttgtttgctaaagcagctactctttgaacagacttcatacagtagtactggccttcgagccgtggatcgacaatcagatggaacttcttcgagtctgatacataaggcttcacccattctaaaagcttctgttcacctcgaggtcgatttctatccactgctcgtcttcccgtgatcagttcatacaacactaccccaaagctccatacatcactctttgccgtcaatttcccggtttgtacatactcaggagctgcgtaaccaaccgtacctacaaccttccatacaagacaaagttaaagacttcaagagatgttatgttaaagagtgctccaatagagacatactgaagttgagacatgaccaagtccttcaggaggtccttgcctagctaatccaaaatccgagagctttgcaccgaatctctcatcaagcaagatgtttgaagacttgaaatctcgaaatatcaactaaaagatcaacagaagcaaattcaaaaccaaaacacaaaacactcttaaatcatataaatggcaatgaaatgcttaacctgaaaatccatttcttcatgaagataagctaagccttgagcagcatcttgcgcaatcttcaacctcatcatccacggtagagataccgacacaactcggcctacgagatgatcctccaagctcttattacacataagttcatagactagaagcctttgcatccctctttcatcatcatcagcacaatacccaactaacttcacaagatttggatgattcactactcctagaaaattcacctcattgatccattccttatgcccctgaacactagaacaaagccacacacacaaaccaatcacaacacataattcaaaattcaatcacaaaccataaagtaaagtttctccttttaagttcaaatttggtagtagctcactaaacttgaaactttaacagagtcatacacacacataacaacagacccacttcgagaaatcaatcacaaaccacaaagtaaagtttcttgaaccaaactggctcaaagttgaaacattttcgagactaattgaaagcagaacagagtaaacaaaaaaagattagagtcatgcctgtaaaccttgacgattaagctgtttaacagcaacattaatcttcgaatcaaaaccattagagtctgaaacatcaacaacacctctataaacgcaaccaaaccctccttcgccaatcaaaagacctctattgaaacctttagtagctattttcagctctttgaaagtaaacacctttagatcattctcaggaacaagtccaccgatccaacgttgacttaatggcttgggaaaagtaagtctttccggtgagaaactccagtctgagtcaaactcggaccggcgagttgggtctgaagtggtggatgatgctacgcttagagaacgagcccatgagagtcttgaagctcttgaaacaacactgtctcctcctcctactccttcttcgattgttgttgttgttctcttgtcgccattggtgaagtgaaaacacttcatgttcttcttcttccccaaatccgaccgagtcaacgaaaataaaaatggtgactttttggaagaagatgatacactttgaagatggcttatgatctgatgtgacaggttttaactcgtagttgatgacgtggcgagttaagaatcgtcgattccgagagatctaaaatttcttgacttgacctaactttggtataagtactacagtaatagtcttgctcagaacgagttagtcgcataaatgttttttttttgtgtgtgtgatatagaaaattcgattactaatagtttacatcgaccacattaatgaatttaaagtaaaaaattctataaaaataaataaaatatatttatctattaagtagtaatgcacgagttttttttaggtaaccataaatatacatataaattattttctgataagaatattattcatgaagcaccaagattttgaaccagtctcgacgattgaccaactttgattagttctagttttattgttgttgttagttgatcggtcgattcatttttatttttctcacctaactaactttcgtatatggaacatggacatttgatgggcctttctcggacttcacttttaaaaattctgattgtatataggtcagagaatacatacataattttgatatgttaatttaaataatgcaaacttcatttactggtttcaaacatcagttgataattatgtaaataacatgtgagacattttgtagaaaaaggaagaattttggccaaaaactgttatgctatttacaaactcaaattgtatcttggaacagtcaaaactaagccaatataactcagtccaaagtttaactcatcaaaacaaatgttttctccatataagaggaatggggaatagatttctccatgcaagaggaggattgtagcaaaggtttctcataaataaaaaagaaacacatattagaggtttgtttgtagttaggagaaataatagggacttttggtttctagtaaatttcacataaatgttctacacatcaatgaaattatattgttcacacacgagcaaagaaattgatttagtataccaaaaatgaatgtacaaataactaaaaataaatagatcacatatagagatggctagttaggtttttacaggcgtctttcacatctactgccattatcaaaagaaaactttcattaacaatccataaacttttttaccatcaaacatcatataacatttatatttttgacgtcacattcataacaccactattcacacttccattgatgatcatgccatcgtagattccacggttggtgcagttgaagtcacgccacaaacagacataatgcaagatccgatgtttgcgacattggctggtgagggaggaggtgtgggttattgggttattgaaagagtttttccaaaatttggttatttgttagatacttttaccgaagaaatgattgatgacttattaagattttatatctacaaaatatttacacatatttacgatattgtttacaaatttctcattgaaacctaaatttcatatttgtttaaagtgaatggaagagactatagatgtcctagggagggaacaaaaagaacccaccacccatgtgcgaatctcgtcttcttctttctactcgttaagtacccaatggaccttcctcgttgatgtgactctcatatatagcttctttccgatttcacccttttttctatctattccctcctctcttttttccatgtacacatttaaactacaaaaattgatgggaacatgaaaatggattatacaaagagcaacccaaatatttttctttctttagttagtttgatcagtgacaagaaaacaaaattatataggtgaataataatttgttaactaaaaatttggaacgaaattttgagcgtgcgtctttattaattaccagctaaactattttatataatatttttgataaatactacaataataattaacaagttaataatgatgtaaaagtctatgatgcatgctcatatagtgaaacaaaaatatttaataaaattacatgtcccacctaataaaattattagaaaaataagtcttaatttttcttaattttcatcatatgtattgtcgcataatacaaatactattatctaattcatgattttttttgatgaaaaacgtttcaaatatattataaatacatgcaaaagctatttatattggatggtatgggtttggctcaagaaagaaaaaacagcaggcaacattaaatacttttcgtgattacatctcattgcttgtgtacaaaatttcactatcatccattttgttttaggcttttaaaagaaatcccataaaatcccatgattcttcttcttttattttttcttatcatccacactattccacccaacctttttctttagataactcaaatatttatggccaatcaattaatttcctttcttttattctaactttctaagtatagtaaccaaccataagaattgaatacccccacccaaaccactttaacataaccgaaattaaacacccttattcttaagtataaaaatacataataaatgtcaaacaaccattataaacaaatacagaaaattgaagcaatttccataaaagagtagaatataacctctctatcatttcagaagttttttccatttaatatcaaaatttggtttgtaacaaaatgatgtttacttttcagaaaaaaagaagataataaaccataaacatacacacatttatatataaattacaatatggagttctacaagaagcattacaaacacaactattactgcttcttttactataatacgctgaaaccagaagtactcttcacatctgcttcacagctccttctactttaaacaaacttctaatttcacccctaaagattacacatttaacattgaagaactaaaaaaagacaccactgtcccacgtttcacactctccaacgaacacatcagtaaaaaaacacaaacccatgagaggtaagaaaatttggaattttagtggtctcttaaaaaacataaatatatatattaaaatttctcaaattactaatgccttcggctggaaattttaatagtaataatgaaaatactaatattgatagatgagtttccgataatgccctcagactctgaagttctttcccatgaaagtctgaccaaacttccaattcgccggagcaatgttccacgacgtcgagcttctacggtcactgcttgtgactctaaaagaaagtgactgaccaaccaaaactgagttagattgccagttttgtccccagttacgactcatggtcatccacgaagtatgtgttcctttcacacctagccgcactatgtttccggcgccagcgacgttagtgactagaaccaagttaaaataacggaaaccgttgattgtgaaccttattcctcctctcttccggcatggcactctgttgtgaataaaagaaacaatacaaggttagttatgtcatttcagtgaaaagttgagaaaacgcgttgttgactaaaagacaccattccattattgtaactcttgacttttattatatggtactgataaaagtaaaaaagaaattgttggaaggacagtttcgtctttttgcagaaaataagatcttttagatttggtaatttagccaagtacgagagacccgacataaatgctgcaccggctcgcgccaagaatcaaaagacaagactttttgaccgtacccctatacttctaacatattatgtttgacaccctaaatgttttaattctacaacattaaaccaaattattcagaatctataaaaataagacttatcaactacaccataatatttataaatgttatgtttgatactctaaacttctagttctgtcggcattaaccctaattgaacagaatatagacgcaagacttctcgactagtaccctaaaacttttaatcctgccacattaaccccaatcatttgacccaatacttctaagatgttaatttcataccccaaagtttaaaatctatcaaattaactccaatttgtctttctcaactaaacaaagcctaggtttaagctgatatataagattccactgaaacaataaattactcttcttaccggcggaaagagacggggacgattccggcacgatactcagcgatcttgagaaacataggcatagcaagatcaaagtgaggtctaggagggttacaccaaccaccattgtcactaggctgagcaaagttcggaggacagaaattagtcgcagtgatgaagattgaaggactaccagaatggcaccattttggatcactagcacatttgagctcaaaacaagcaccacagctaaaaccattgttgaacagagccgtgcttaaagccgccgtgttcacaccatagccttggctgtataagttaccataaccacaagctcctcctgaaaacaaaaaacagagcaaaaccgttaatttgacaatgtggtggtttggtttagcatagatgaacataaagattggatctttaaggtacaaaatcaagattttaacattttcacaatgtggttaccaaaaaagattggaactttaggttgatgagaatgtggaagagaagagagagagggagagagacatacccattgttccagaagcatcagagccaccgtagaaagtggcgtgagcagtttcccaaccaccaccattgtaaactcctgggattcttgcttcagacaatgcaagaattgtagtaagaacagataaaaccaagcccaacattgccattatctgagagagagactgagaaaatagagagagattgggagaaatgggcagaggaggcagaagaagagtttattggagtgtctccatgtgtgtagggaagggtatagagaggtgactatatataaattgggacttaagcatttatttatttctcttgctttgtattattctctttctttatcattacaaaagtttaacctctaggggtcatagttctctagcttatgaatagagattactaaacacgatttgggtttttgacaaaagttttacaattatttgtatgtgtaaaaaaagtcatgcgtacaaatccataattaaatgtttggtgtatgccctttccctcaatgtgtctctaccaaaatatagttattgctaagaccacttgcgtttagtaacgtgtggttcacactgcccaatcatagttcatagtgtacggataaagatgatgttatatcaccactaaaatctgataaagatgttaccacgctccattgaagcgcgttgggacgaccactctttagttgctatcaaaatttttgcgccctttaaaattgctatatcgtctctggctatggacctatgataactattgatgtgtattgaatttaagtaatacgaatttggtattctagtaatggctatgttaattttagtttctaaagaaacggttatagcttatgatcatggttattagtttatatcatcatttcggctattggacttatgtacagtaaaaataatattttctttatcatatatttaatgcaatttggtaaattttacattatctttcgccaaattattcaatttttatatacgcaaaaagctagacctcaattcacttttttttttctttgctcaaaagagaattgtaggtggaaattcatattattttttcgagatcatagaattttgaagtttcttgtctgaaaacgtttatggatggccaaaaataattaaatgcagtagaagagttcgaagtgaataactgaatatggacacttaactactaaaaataacataagtatatatttttcggtattatcaaagaattggaaatattttatttttgtatttataatgttctaatgatgtagatattacgtaattatgatgaaatattttatagtgttcacgggtgtacgagttttctacttgatacagtgaaaaatactcatggaaaagtcccgctacttaaaaaatatacattagcataaagaagttgttatagtaccttaaattaaaatcaaagacaaaattattgttttagtatcacacctaatacctttcttaagcataatttcccctttgttgcaagatacatgattggtcctccgtacgtaacggacataagaaaaaaatagagagagggtacgtcacgtaccgtacgtgtatgttacttggaagctaaattaataacaattatcaaacttcgtgaatcaaagtttgatacgccctaaaaaattcacacgtaaatatcactgcaatgtgatttcgagaactaattcaacttttgttgtttgtaaattaggatcaagctttccaaccataattattttaagttgagatcctatgtttggagaatctaaagattacaagtaatatgaattgatatacatgagatctttaatctaagtactccaacatgtcttctctagagaccaactttggcacacattggagtaaatttggctcgagacaatggttttctcaacattaggctacatgagcaacaagaacgacaccggattgaacaagtcctcgagtaacaaccctaaactggatgcaaaaaattattatggatatctaaacgaacaatgagttgtagaatataatggataaaactgaaacaaatgaattactattttgaaaaatgttttaatgcatcgttaatctatgttgtttttcatatctactctatttttttttcagtcactaattttaaatattaattcaactaatactcatatacgtacaaaatcagacatgtgtggtttggtaagagtaggactatacataccatctagaattgagatagattgactaacaaaaggagataacctaataatatgcaaacattgtcacattttatatcatcttatacttaaaaaacaaacccatctttgacgaatttagcctcgagtgagtatgtaatatgtatgattgaagaaggctaggattggatgatgagtgatgactaacataagggaccaccacatggaatcctatcaagtgtacttgtccgacgtataactttgggacccttttgattaccgtaatcaccggagcatgtaaaccggtgaatctttgtttaaactgaaacattaaaattactacataataagctcaccacctaaaaaacgaaactaatgttaatactttaatgtttcttgaaatccaaagacaaattgagaaaaatactgaattctcgagccgcacgcgccaaaacaatgccaatatctctgttttgttaatggtggctcttttattttctttcattatggctaaaagcataatgcttttttgacatctaaaaatgtttgctgaacatgttgtggagcctattgtaattttagtaacaggaagaacactgtagtttgaaaaatcacatggttctatcataaaagcattgttttaaaaagaagtttaaatggtctatatgatgttatatatgcatcaacatatggtagcaagtattttctaagtgttagggtttagtggttttgttattaaacggctttaagaacattaggtagatctagacaactttcaatttatcgtcgaaactttgaaatattttaagtttattatgaatcataatatctttataatattatcagaaattagctaaatttttttttttatttaagcacttaaaccgcctacatgtatctaggctccaattaaacattagatattggattctagttttttttaacactacttaaaagaataataagcttttaccattgcaagaaaatagaacatagaaattgtatttggtaaagaaaacccaaaatggttggagcttgtgaaaccactggctactactcttcaagacttctccaacctcccatgtgatcatctcgacaacacttaaatccgaagtcttaccaaatcataaaagtaactaaactacgtggaccattggcgtatggctacgtacccaaatcgtgaaaattttcttcgtagaggttttacgaatccaatgcggtagtccccaccctatgaaactgtgtctcaccatgtgattacaccaaatcatatctgactctaacatagatagctttaacaattatatcattcattctattttattgttattagtgatcagttctgttattgtttcagatattttgactggctaactgtttacagcaaacaagaaactgatatagaccttttaaaaaaaaactaagttaacagttttgttttggaaacattaaagctttcaaattgcgaataacactttctcacatagtgcattttcgttctgacgtttaacgtaatgcttatatgataagaaaaagaaaatattcaagttttttgttggtaaagagacattgaataggcagaagacgttgctataaactgaaccaaccattttcaacttgttcacacacataaccgttttcgcattaatagaaagaaatcaaaataaatatgctctcattaatcctcttacaaacatggaacccggatcctgctatggaaaattatatatgttgaatgttctagtaactaatgtgaccgtaactagcctgataagcttatgcaaaaaaaaaaaaacagcttatgcaaaatcatggcatgtgagtaggcgaaaacttatacaaatacaatcaaaataatgtgatattaatataggtatgtttacatatctcgtgaattgatatccaatggacctgcaagattttcatctaatataactttcattttacgaagaaaattatactttggaatttgatgtgagtcgtgaactagtcgtctttcttactttttatgattatgaatcctaacttcttggtccaacctatatatatacaaagatttcataccgaaagtcaaatatatgatattatggagatgtactatgtgaacaacaaatgtataattatgagactggtccagagaaacattagatggaagcagatttgtagtccatggaccaaaagaactagtccaaaacttgataattatcaaacaaaagtttttgatcaattacaaaaggagttagggaagcatgtaacataaacaatgacaacatattttggatcagtgagcatatataaacaataaaaataccataatccgatgaaaaaaatcatcagagatttgcaaaagaatcatttatgatggatcaccgccaaaacacacacaaggccacaaccaacataaaaccaaaccaaaccaaaccaaacaaaacatccacactaatatcacatacgaccacaatcacaagtaaatacaatgaagtcgtacaaataaatgaccaccaaaaattatatttttgtaaagtaagtcagggaaatccaaaatccttaataaccatgggattttttttggcacaagttatcgtgcttttgggttaatttcggttgtaaagcttgtgctcatttcaacagaacttcttgatcccatgtcttctctcactcctcgctttgagttttctaatgttagacattgctttagttcattagtaacttgagacatggttggtcttttctccgaagaaggattcacgcaagacattgctatctcaagagccttccaaacagaagtaggctcataatctctattgagtcttggatccacaacgttctcaatatctcccttagtaagcatgtatcccacccatgctgctatgtgcggcttctctcgggtttgctgaatcacaggtcgacttgtgatgatctccaataatacaatcccaaagctatatacatcactcttttcgttcaacctatttgttcgataatatctacaaacaaaacatgaagtattttttttttcaaatgaatgaggaaaaacaatttgaatcaaactagtttggtgatgtaaaacttactcgggatccaaatatccaggagttccagcaacagctgttgaaacatgagtttcacctccaactggaaatgatcttgaaaggccaaaatcggcgagttttgcttggaagtgttcgtctaaaagtatatttgttgtttttacatcacgatgtaccattggaggtttgcaacccgtatgcaagtattctaatcctatatttatataattaaattgttcatgttagatgatccatataaagtgattaatgcatttgagctaagaacgaaccttgcgcagtttcgacgacaatttttagtctacttgaccacttcaatggagagccaccccgttctcctataattaagaaacttttagtaatgttataaaagcatgaacattaaaatatggctaagtaatcactattttaaaatgtgggaaattcaaatttatacctgatagatgttgttttaagtctccgttcggtgcatactcataaagcagggccaagttgctttcttcatcacaatatccaaccaaactaaccaaattgacgtggtgcactctcaaaagaagttcaacctgaccacccatgtccaaacaaatttaagagccatcacatgttacaatatattccatgtattatgtattaacatacctcagctttgaattccttatagccttgtactgatgattgagagagtagtttaacagctattggttgcgtaccatttaaaataccatgatacactaccccaaaccctccttctccaagaactctttcaaaattatctgttaatgcttctacctctgaataagtgaaccttttcgtttgagtaaatatagacggtctatttggtaacccatgttgcactgtaggtaatgaatcaactgtcacaaccaaaaagttccatgagattaggcatcttttggtatgtcatcatcatgcatgcatgttacgataagaatatatatctcattgtataattatgtaccttgcgttggccttctctttttgaaaacaagaatgagaatcagtacggctataatgatgagcacagaagctactgacgcaacaactggtacaatgtacgtttgattgttattatttttgcatgacgcatcgttacacaactttgggtttccttggatccttaagaaaataagtgttgttgaataagactataggttgaggaaagttgataaaaaaaaaagaagggtgaaaatcttacgttagcttaagcccattcttttctctatcaagaagcaatttaggaagaggacccgtaaggtcattccaatttaaatttctgtcaaggtaaacacaaaattacaatgtcaatgtaaagtgacaacaagtatacctagtgaaatataagtggccggccattatgtttgtttatatcaacttacatgatcgataatgacttcatgctggctagaaactcgggcactcctccagtaaaactattatttgacaagtctctagtatttataaaacgttaaaaagtcaatctattttccgttaataggataaataaaaaaatagtatgagatgagatattttttttcgtccaatttgttataagatgtgaaaaattagaaatatgttggtcacaatataaatgttttctcatggatcgcgtttaagtaaaatactaatagctcttacagttttcgaagctcggtcaaattttggaaggcaggcgcaatgaccccttttaaccctcgtgatgacaaatctctgttcacaatataagaacattttttcagatataagatacttaagacttaagagatttaggtttcaatatgcttatgagatatataatgatcgtacaaagaaataattcttggaggagtagacttatttgtgtagctgcattttagatcttcccactttaatagttcagggacacaaggatctccttgccaactaatcatcttcaatccataaaatgcttcgatatccttcatagcagcgactaacataatggttcgaggaggaagccaagaattagcatataaaagattaaagtttcttaatgagggtatgtactaaataaacaaaaattccaccctattatttgcaaaaaaaaaaaagattaagttggttcatttatcgcgctatttttaacaaatatcatgtcatatttcataacacaatttttaacatggtagtacaatatttcaaattaaacacgataaacacatgaatattttctccgttttgtgaccattatttttcccccaattttgtgattgttttttttttttttgcaaataagccctttcttacagaatagagaatggaatagtggcgtaccgtcatttggatttgtttcagcgtatggaaagtccacaaccttgaaagcctcaatagcactaatcagcggtggaagagttgaccttggagttctaacgagtttcaagtagcacaacccggagctacatttgtgaggtgataggttatatttggtatctgattgtaacatcgtaggactatatgctgactgaataatatcttcttccaattcaatgtcgaattctctagtctcattgcccctcaaagcttggatttcggcaaagtgaaagtacacgttaaccttgtcactgtcgtcatctagagacacgtaaaatctcaatggcaagctggcattttcgggcgtgattcccatcctacttacagcttctggtacttgaaagggactcgaggatctcacgttgagggtggtgttcacatccgtttcaaattcattatatcggtcccatttgcgatcaaaaatatcatcaggatacctaaaaccatttttggagtagccatgcaaaagtaaatgaatcatgttagattgtttttttttataaaagagttgctaaagttgagtttacataccgtataaaaccggtagaattgctactataggcccgccggtagatgaggtctaagggaccgaattgagtcaaatatgaatcatttcttagtggccgtagttccaaggttgatatcattggtatagttgatcctgttttgacaagacaaatctgcaataagttcgacgttgtcatgtaaatgatctcacgatcttttccgaattccaaatcaaccgcaatccacatgttaggcccaacatgtaaatcaaatttgggatatacattaagaccatcataatttccatatccgaaccctgctcttatcaaatagttgatgccttgctctactttcagattatagcagtttcgtattccatcgggaaaatatctcaaatccttgtactgcctgtagatatatgtgttatcatccccagcttcaccacgtaaaccacttaaaataaaatcagcatcagatgagaatgttaatccggttcgtgggtcggtataaggagactcattaacgggtaaaccgcaatccaaactgatgaatcctggcaagatacaaaatgtattattagtgaaaaataatgttttccttttgttagaccatgaagcttataaggaagacaatcaaaagttttggaaaacagagaatcctttattttctttaaccaaatctcttatatctgtaatcgttaatattattttcatggtggctatgcgtacaacaaagtagaaatcggttagtgatctcgaccagtcgagcaagaacactcaactacttggctaatccttaagtctttatgtgtcaaaaactgaacatgaagcaattattaaaaaaaggtatatagagaaacctcgttgatcaggcggctgagcttgaacaagatgtgtaatggccaaagccccaaagatgaacaccagtaaacgttgacgacgaccttccattttcaagttaagttaacatacaaatttttgaaaccaaagacaatctgaaatatatgatacaatatattgattttctagtacaaatgatagaaatactttagatgaagatcaattaaaatccaaaacacatgttggcgtggaatactctccaattatagattcatatccaagcacgactgaagaatggtctaacaaagatatatacatttatattccactttgtggaaaaaagagagcaatttaatcataaatcaaagcacctgatgtaatctttgtttaaacaatgtaaaacctgccaagttgatctaatgtcaaagctttataaactatatgataattctgctaacgacttgtacttaacaacaacttggtggatttaatacattttgttgactttcactcaattataatcgcaatacctctgcaataatgtaaaattcttggtcttcaaaaataaactaagattagtcttttcttgacaaaccctaatattcgttttgtttgcctgtatatgcattatctatctatggcttactcatagacgttaagagatagctggcctcttatagttatagctcatattctcagtattactatacattgtcaaccaagaaattctacatcaacctttgttaatatcccttgttaggtgggatttagtgggaaaagagatcaaaccttattttggaaagatcatttccaaacgctactggaccattatccacttggttcacaatttgcttttttaatggagctttgacaatcggaaactgtatgtgttaactatataaaaatattaattatgtgataattcttattttttattgttgcttttttaacaagtttgtaatagttaaagtgtggttgtaaatatatttttaaaatttagtactggctaccttgatgcacattatttgtataaatacctgagtttgtaagaagcaaatcattgaatcaaacaaaatgatctttatctttattttttcctgtccatgttgtaatatacgaattctctcttttacataattattctacaacaagttacataagttacgtctataattattgtggatcagacgtaatgtttctttatgtgaatcagacgtaatgtttcaaataggttgtaatatgtaattgtttttcatatgtagtaaatccttttttgtaacgaccgggttcaaactaattacttaaatcaaaccttgttatatccttgtgctccaagtctaacgatcaatcgaagatttattatgtttggtcaagggtttaaagaagacatatacaaaccttaatacaaggaaattcctatacatgtcggagtcttatgatcataacctattattttaaacacaagttggggttggaacatgtcaaagaaattcacacaataaaccaaaaataaagcaattctcgcaattattcaatcttcatgtctggcttaagttgactttctttaatgtattattccttccaatctgtgtatgtgaggtatttctcatttacgtagctccttgttttcactaagcaagtcttttttatgttcttgatttccatattagctttccaagaagatgatgagccatcttttgttggccataattggaacctttgccgttatagttggcgcccaaaaacaagaaggtaataatttataaactctttagtagatattcaccgaggatcatccatcctttaaattgatatatcttctatatatagtttttttttaaacttcgtcgatcctttttatgcttgaacaggtttcatcagtttggattgcggatttcctattgaggaatctccttatagtgatccatctactggattaacattcacatcagattcaacatttatccagactggagaaagtggtagagtcgataaagagctcaacaaaatattccgaaaaccatatttgactctaagatactttccggaaggaaagcgtaattgttagtctgaatgtcactcgtggcacaaattatcttatattggttaccttcatatatggaaattatgatggtcttaatatttatccaaactttgatctctatcttggtcctgataagtgggcaagaatagatatggaaggaagacaaaatggtacattcgaggagatcatacacagagtgaggtcaagctctttggatatttgtcttgttaaaacaggaccaacctcgccaataatatcatctatagaactacgaccaatgagaaatgatacttatcttacgcattcaggctcactgaggaactctttccgggttcattgcagcacttctgatagcgaaataaggtaattagttgactttgtttaaaacaataagtgggagttttctgtcattaatcatacatggcatcaattttcttatacataaattattgtacttttggttagtatataaacatcgttattcatgattaacttggataaaaaaaaacaagttgcaactatcaccgcacgacatgttttgttttaatcaattttctacatttttttttttgttatttattatcaaactatcatatcgttatacaatttttttaaacatgtaaacaaaaatgattcgtgtatgaaataaatgtagtttgcattgagattagatttgtgtgtgtcagctattttttttctatttaaatcggttttaacaaataacaaggattgatttgcttaattatgctgcctaatgcaatttatttgcaggtatgatgatgactcctatgatcgtgtctggtatccattcttcagctcttcgtttagctatataacgactagtctcaatataaacaattcagatacatttgagataccaaaagctgcactcaaaagtgctgccacgcctaaaaacgctagtgcaccgctaatcataacttggaaaccaagaccctctaacgctgaagtttacttctatcttcatttcgctgagatacaaacccttgcagccaacgagacgagggaattcgacattgttttcaaaggaaactttaattattcagcttttagtcctaccaagttagagctacttacatttttcacaagtggaccagtgcaatgtgattcagatggttgcaatttacagctcgtaagaactccgaattcaacccttccacctttgatcaacgctcttgaggcttacactattatcgaattcccacagttggaaacaagcctaagtgatggtacctcactcaatctttcacttattaccacataattgtttttggctttccatatatgctattgatttctattgtttatgatagttaatgctatcaaaaacattaaagctacgtaccggctaagtaaaactagttggcaaggagatccatgtctccctcaagaattatcctgggaaaatcttagatgcagttacacaaatagttctaccccaccaaaaatcatttcattgtaagggcattaccaaacatagttcctatttttaaaacaaatttaaccaaatatatttgttaagtgtacattttattttatttgttgcataattagaaacttgtcagcaagtggattaactgggagtctaccctcagtttttcaaaatctaacgcagatacaagagctgtaagtagtacttctattgttgactcatcaaaccaagaatgatttgttcggacgtgacatgtaagcgaaccatatgtatttatatattggcgtgcagggacttatctaacaacagtttgactggacttgtgccttcttttctggccaacattaaatcattatctttgttgtaagttttctagaaagtagattgaacattttgcttacgttttcgttgttgttggatttagctatatatatgatgttttttttttctttttcttaacagagacttgagtgggaacaattttaccggttcagttccacaaactcttcttgatagagaaaaggaaggacttgtcttgaagtaagattattttccccccattgtttatcaactaaacataaatggtagtacttgtataaaaattagattgcttatatatgcaagatctggtcgtaggtgtacttgaaagttcagatatgttccatccacatctttatggtacattaatttaacaatcttggtatcacatgttccttgtagacttgaaggaaatccagagctatgcaagtttagctcatgcaatccaaaaaagaaaaagggattattggtaccggttattgcatcaatttcctctgtgcttattgtaatagtggttgtggctctcttttttgttctccgaaagaagaagatgccttcaggtgagtctcgaggcaaataaccattagagatgtattataacatcaatgtatataaatcaatcattgtactttgtagatgcacaggctccaccaagtttgcccgtagaagatgttggacaagctaaacattcagaatcatcattcgtctcgaaaaagataaggtttgcttatttcgaggttcaagagatgacaaataactttcagagagttcttggtgaaggaggctttggagtcgtttatcatggttgtgttaatggtacccaacaagtagctgttaaattgctctctcaatcatcttcccaaggctataaacatttcaaggcagaggttagattttgatccggtgattgttgttggaatatccatttattatttacaagtgctttctatcttaaagagtattagctaatgggtggttcgttaggtggaacttcttatgagagtacaccataaaaatttggtgagtcttgttggttattgtgatgaaggagaccatttggccctcatctacgagtacatgcctaatggagacttaaaacaacatttatcaggtataagaatatctttaccaatttttgttaaaaataagagttttgtttgaaaaagatcagaacattaattatcttaattttttgttggtttgttacaggaaagcgtggtggatttgtcttaagctgggaaagtagactaagagtagctgtcgatgcagcactaggtacacactaatttactgataacaatttaagacaattatatagttcagattgtaactttcaatagtattagatttgcctctaggaatcagcaagaaccatataatataaaataataattcggcactaaaaatttgttatgtaggtttggagtacttacacactggatgcaaaccaccaatggttcacagagatataaaaagtacaaacatacttttggatgaacgtttccaagccaaattagccgattttgggctttcgagatcttttcctaccgaaaacgaaacacatgtttcaactgttgtggctggaactcctggttatcttgatcccgagtgagtattttcttcatattgtatgttagtccataaacatgcatcataccttttaatagttactagccataaaccaccttcaatgttttgttttgtaggtattatcaaacaaattggttgacagagaaaagtgatgtttacagtttcggaattgtactattggagatcatcacaaaccggcctataattcagcaatctcgtgaaaagcctcacctagtagaatgggttggatttattgtaagaacgggagatattggaaatattgttgatccaaaccttcacggagcttacgacgtcggttctgtctggaaggctattgaactagctatgtcatgtgtgaatatttcttcggcaagaagaccaagcatgtctcaagttgttagcgatcttaaagagtgtgtgatatctgaaaattcaaggacaggagagagtcgagaaatgaactcaatgagttccatcgaattcagcatgggaattgacaccgaggtgatccctaaagcacgctagttctttaaaatgaatttacccttgttgggttttgataaaatcttcaattctgcatctctaaagggtttactgtaaaatgattattggatttgatgcaatattcaaatatatttgttgtagcttgatttaggttgtcgtggaaacgttagctcaaaaacttgtatgtcgaaatacacaccatattttcatgttgacataaaagaaagattacaaacatttgactttatcacttgaaaatggatgaaaaaggcactagatgaataatctactaataataatgtttaataactaacggtataacatcttatataaactttgttaaaaatacatgttgctttaagaactaaccttattctttcacatggaagtgatttctctctgtccaaagcagttgaatttttcttagtttattcaaaatgtggaaaactgttcaatacacattcagtataattgtatctttttctctttatttgttctaaaattatattacgttttgaagaaattcattgaaattatattaccgaacaaaagtttgagtagttcaatttggatcagtttaagggtatcaaccgaccatatttagtgtaaacatagttcgaattttggtgagtttggataagaatatatacaaaaaatgctgatcgatgtttgtatcctttttcctccgtcttttgtcttcgaaaaatattttgttaaaaagaacattggattcttttatcatctatctacaaatcttgcatctccatcgtcattttcttctctttaaaaaacatttcatcaaaccaaacacaattcatgatccagctatactcttttttcctagttcaaaagtactctcctccttttacgtagtttttctttcattttgttctctcttacacaacaagtaaataattttacataatattcaaaaaaaaaaagaacatttaatcaaaaaaaaaattcaattgaactgatccaaaattcaaacttaaaaaaagaatattaaaaactaaaaaattaaagttattcgtaaatttaatatatagagctaaacaatgattagttttttttttttttttttttgaaagaatgtaaaattttattccatcaaaaagcttttgtacaatgaatgcaactgtttgtttagaatatagcagaggaaactgaaattacaaaactgagacaaaaattcagagtggttgtggggaagaatgaggctgcctcatggaaaaccatagctgcatacagtcgttgtagttatgatctcccgtgtctcggattgagctgattcgattgcgaacagttttgtcgatgagtttgatgagccggtttgtaggtgagctgatttctccatgccgtcgtgcattcctttctcgccagatatggtagatagaggcttgaaagacgtaccggaaaaggaagaggtggtcccgtggcagatttgaggtacagagcaaagtgaagaggcggttccagtcccgggagtagttggtggacaagagccgttgcgtaagagcttcccaaacgtaagaggtgtattggcaggagaaaaagaggtgatctcgtgtttcctcagcattgttgcagagcgtgcaggtgactagttgaccagaattccaagctttgatgcgatcgcctgtggatagtctattctgaactgtgagccacaaaagaaaagagtacttgggcgttgaataagggaaccatacgcccttgtaccaattctgttgtggctgatgcgttctgacattattccaagtaaccttagttatgaaccgcttgttgaaatcatttttcaaggaacgccaaagtgagatatcagggcccgcttctcgttcttgttgttgtaaccgttggatttctgcgtttattctattgtagatggcagcccgatgttgacggtgttgatgggttcgcaagacagtttccagatttgtttcgagtggtattcccaagtctatgacccgacgagtacccgttatgtccaagagccggcccagatgtgaccagtgatcgtaccagaaagaagtggagcttccgttcctcacttccaccttatgcattgatttagccagctctctgtattttagtaactttttccacatccaagaacccaaactggatctttcatttgcagaccaaaacgttcctttccgaataataaaagtccaaatccaagtcacccatagtgatggctgcgtagagagaagtctccatatcagctttaaacaactgaccttgtttgcttcagcaagtgatttaattcccagcccaccctctttcttcggttgacagattgatgaccatgctatcttagctttcttggggttgagaacagggccagaccacaagaaagcagagcagagtttctcaatctctcttatacaacctgcaggtagacgatacgctgacatccaaaaattcgcaatactgacgatgacggagttgagaagcgctagccttcccgcataagatagagacctggccgtccaggagctgatttttgttttcaccgcttctataagaggagaatagtctgcagtagtcatctgctttgttagtaatggaagccccaaatatctaaccggcaattgaccattggcaaatgggaaactagagagagtttggactcgatccgaagcagaaactcctgcaagataaatagtagacttttctagactgatttgcaaccctgatcgacctgcaaactctttgaagacgttaatgacaccctcaattgaccactgatggccatcaacaaacaccataaggtcatcagcaaaacacaaatgtgtcaaaccaattttctcgcattttggatgatagccaatatttctatgaaccgctgcttcatcaatcatatgtgagagcacattcatgcaaataacgaaaagatagggtgagagtgcacagccctgcctcaagcctcgtgaactaccaaaaaacccagccaactcgccgttaacttgaaccgagaaagttgctgtggaaatacagagcttgatccaatgtctaaacgtttctggaaaattcaacgcttcaagagtattgagcagaaattgccattgaacagagtcaaaggctttggaaatgtctattttcatagcgcaccttggagtaactgattccttatggtagtcttttaccaattctgttgctaggagaacattttccatcaagagtctttctttaacaaaagcagactgattttgcagaataaaactaggcagcaagagttttaatctgttagcaagaatcttagagatcaccttatataacacattgcagcaagatatagggcgataatctttcatctcaatggcttcgtctttcttcggaatgagtgctaaaatggttgcattgagtccttttgggaggaagcctttgacaaagaaagattgtatagcagctatgaaatctggaccagttaatgaccaagttgctttgaagaactcacttgtgtaaccatccggacctggggacttattatttggcatagcgaataagaccttttgaatttcttctcccgtgacttctctcgtgagtatattctgatcagttaccgagcatctataagacatcaaattacggaggtcttcaacagatataccatgaaaatctcctgattggcggttaagaaattcgttgaaaaaccgttccgcttctcccttaatttcctcactagtctgcaacgtttcagcatttggaccccgaatctcgcgtatcgagtttctcattttacgcacctgcgctgccttatggaagtatgaattattaccgtctcctacattcatccagtggagtttggatttttgctttaagaagccttcttccaactccgaaaggtgagtccaatcagtgtaagcctttaactcctctgcaattgtttcctgcgacggattcgccaaagtagtagcttgtttttcacaaagtaaaatatgagcttccctcgttctcttaggtagatctcccaatttttcctttcctagttcccgtaagtgcggctttaaagtcttcagtttctttgagaacctatataacgctgaggtggaaacataaagaggagctgaactcgcccaatgactctctacaacaggtagaaactggggtagctttgtcaacacattaacaaatttaaacggtttcctgcctccagttgccgcagcttccaacattaatctgccctgagaatgatcagaacaaccaccggtttcgaaaacgttgtatgaatgtggataagcagaacactaggaatcgttgaccaagcatctatcaagttttttgcagaccaaaccctcttctcttttgttacaccatgtgaaacgtgagtcatgatatccaaggtcagaaaaagagcaatatcttacaatctcctgaaaatctctcatccctggaggagtgtagggagagttatcatagtttgaatgctctccaccttcaagaatttcattgaaatcaccacagagaatccatggtttgttacgaatcaacggcgagtcgtgatgagagcgaatatcttcccacaaaatacgtctctcctccacaaaatttgaagcataaataaaagaacaaaagaattcttcttctttaccttccaacagaatcgaacatgttatcatttgactactcttaaataccggagttagtcgagcattgtccctccaaacaacccaaatgcggcctaaccgatgtgattcataattagttatagacgaccaaccactaaaaatagacgaaagtagttcagctgatctgccctccttgactctcgtctccagaagacaaccaaattgcatagaactgtgattcacccaacttttgataatggaatgtttagaagatttatttagaccacggacattccaaaagaaacccgacataaaaattatttctttttatgagccctatgacctgaaacactagggttacccttcgtgttttgattcgcagagcttttgaccaccttatgctgagactttgagattcgtgggatgtacggacgagtcccttgaacaccaactgaatctgaattatcatttaattgttgggagagaacaacaatttctccttcctcatgaccgtttgtgtcagccgtgtcctcctccactgctaggacatcaaaacgagaaggagacgcatgattaactacttcttgaggttgaggactcctctgcctgcctaccttagcaggcgataccgtgtgccagggaccttcgtccttcaaattttcctcgttttcctctgcaacttcctttcccttattctgtaaaacagtcggattcttcattggaactttctgagtgtgagaatcaccgtttagcgtttttgtcaaagtagccgaaggagatttcgatagtatttcgagaggtttttctttcatgagaggaggctctgttttatcctctgtttctatctccgttggtgtggatagctgattgggtgatggacgcgttagacaaacctcttgtatatgtccccacttagagcatgaagagcatctcggcggcaaccaaggatacttatattcgaccattgcatcaacgccagtttcagatttaaagcggaattgttttggcatttcctgtgttaaatctgcttctacaaataccttagcttcctcaaaactgttgcacagaactgtgtcagggtgaagcttttttggttccccaataggacttgcaagaaaactcagacccttccaagtaaacattgagcgtggaacatttttaatggtgatccacattggcattgttttaatttctggctgagcatcctcagcaaccggggaccatttagaaacgatcataggcatgtcagctatgttccacattcctctgcgaagaaccctagctcggactgaactctctctgattcggaatttgattgttttagtgtctaccacatatgcgtcaatctttaccgtcttgtctccaagtggccagatcttgttcacaataacgtgaacttttgcaatatgcggagatatttgtggaaaccgccctatgagcaaatcatcccacaatggtgttgaatcttcaaagatttcatttgggacttggacaatcgaatcaccgttgaccattgttacgttgaattcatgcttcgaaagggttggtctattctgaacaattgatgagtatgatggtttggtcgtttctggggaagcttctgaacttttcgatgtgctctccaccaccatcgccgtcgacatgatgggggaagacggcggaaaagccgccagatctgccagattgggacacacggtagtgaaaccctaaatcgccttcaaaatcgccctgccacgtcagccctaattttttacctttgattgattggtctatgattagtttgccgctgaaaaaatcaacaaaatataatgtgtcagtgaataacatgatttttctttttaatcaaaaaacatgatctttgtatactaattctgaaacttaattatatatattcgatccaatctagtaaactagtttataggacgggatccaaacgaaatacttatccacgaaagaaacctttatatatctttgtgctcgaaagttttctcattcgttattttggtggctgactactaaatgaagatataccaaatgatttttcttcactcaagcaatttaagcacatagacaaagtaagatcatctggcgataaaccatacattcgtggaggaaatattcctacacatgacgagtctcctgaacatatacaactattcaacaccagattgattatttccacgatcattatttaattttctacccggagttgacttttgtatatttcattccaacttatacatgaggtatctctcagttccatatcttttgcagttttccctaagcaagtctttgttttttcttgagtactagagaaaccggatagtgatcgagagagaacatgaagattcaccttttgttggccatgattggaacctttgtcgttataattggagcccaggatcaagaaggtaatgatatataccatctctttcttgtttataaatcaatcctttgacttgtgatatgttatataagaatgtatcaatatcacttttcccatttattgcttttatatttgaacaggtttcatcagtttagattgtggattacctagtgacgaatctccttacgatgattcgtttaacggattaacattcacatcggattccactttcatccaaacaggaaaaattgatagtgtcgataaagatcttaacataaacttatcaaaacaatatttgactcttagatacttcccagaaggaaaacgtaattgttatagtcttgatgtcaagcgtggcacaacttatctcatcgtggttagctttgtatatggaaattatgatggtcttaaccgtgatccaaacttcgatatccatcttggtcccaataagtggaaaagaatagatttggatggagagaaagaaggtacaagagaagagatcatacacaaagccaggtcaaactctttggatatttgtcttgttaagacaggagaaactttgccaataatttcagccatagaaatacggccactaaggaataatacgtatgttacacaatctggttcgctgatgatgtctttccgggtttatcttagcaattcagatgcatctataaggtaagtcaatctatttgaagcattcaatgtgacgtttttcttttgaataaaatttaacattattcttttaaaaaatgtgaggtttttctctctttttttttctggagaagatatgaatgaggggatatgttgactttacttgtgttaaaaacatcattgttgaatgatgtgttcaaaattttaagactccaacgtaactacattatgccaaaactatatggcaagtcattgtaacaattgaacaaagaactaagaacaacgaactagaaataaaagatactaatatgagctaagaaaacaaattttttttttcttttttttgttcacaattaaaactaaattaattaattgaaagaaaataagcaagaaccaaacaaccaaatcaaacatacaaaagactaacattattgtaaatcaaactaaacaagcaacgataaatgaaattgaatgattgaattcattattaaaaaaacgagccaaggtgattgactcggatagttgccaactaacttagtttttggtatcttagtttcatagactagtatttggctaatacaatttacttattaatttatgtggctaataaaatttattgtaggtatgctgatgacgtccatgatcgtatttggtctccattcaacggatcttcacatacacatataacaactgatctcaatataaacaactcaaatgcatatgagattccaaaaaatatactccaaactgctgccataccaagaaacgccagtgcgccgctgattattacgtgggatccactacccattaatgcggaggtatacttgtacatgcactttgcggagattcaaacccttgaagccaacgagacgaggcagtttgacgttatcttgagaggaaactttaatcattcaggatttagtccaaccaagttaaaggtatttacattatacacagaagaaccaatgaaatgtggttcagaaggttgttatttacagctagtaaaaacaccgaactcaactctgccacctctgatcaacgctattgaggcatacagtgttatcgagttctcacaattggaaacaagtcttagtgatggtacgtacctctcagctttcaatattacaggaatgtaacttatattataaagtataagctatgatattgattcttacattatattataaagtatgatattgattgttacgttctcttaataattgtgtcagtggacgctatcaagaacatcaaaaatacttataagctgaataaaatcacttggcaaggagatccatgtctccctcaagatttgtcgtgggaaagtattagatgcacctacgtagatggctccacttcaccaacaatcatttccttgtaatgtcattcacaaacttactctttaatttaaaatttaaatatctaaatattttgtatgtgtttttgtattattagagatttgtcgaaaagtggattaaatgggagtataccccaaattttacaaaatttcacgcaattacaagaactgtaagtatctctactgttgatcacctgaaccaataatgatttatttggacagaatatgtaagacaatttcttttgtttgtgcatataaccacagggacttatcaaataatagcttgactggaccggtgcctatcttccttgccaacatgaaaacgttatctttaatgtaagctatctaaaaagcataaatgaacattttgacctgcgtatgtatgtatatataatggttatctttgtctcaacagaaacttaagtgggaacaatctcagtggttcagttcctcaagctcttcttgacaaagaaaaagaaggacttgtgttaaagtaagatttccttttccatagagggaatgcatttactaatcatatagtaacaaagtagaggaacttcatttttggagactatttaactgctagatctttcttaattaagagagttcatgtcgattaaattatcgcaaaatatggtacctgacagttcgattattgcctttcctatgcaagctatttacaatttcaaaatatgtcatattcattgtagacttgaaggaaatccagatttgtgcaaatccagtttttgcaataccgaaaagaaaaataaattcttgctcccggttattgcatcagctgcctctttggttattgtagttgtggttgtggctcttttttttgtcttccgaaagaagaaggccagcccttcaagtaagttatgagccattaataatttgtttacctgctataaagcaatgcatatagttagcatataaccaaatatactatcatatgtagatctacatgctccaccaagtatgcctgtatcgaatcccgggcacaatagtcaatcagaatcatcattcacatcgaaaaaaattaggtttacttactctgaggttcaagaaatgacaaataacttcgataaagctctcggtgaaggaggatttggagtcgtgtatcatggttttgttaatgttattgaacaagtagcagttaaattgctatcacaatcatcttctcaaggctataagcatttcaaggcagaggtaccctttttctagtaattctcaatagatatccaattgatttgtatatctctaagagtgttggatgatggatgattggttaggtggaactccttatgagagttcaccatataaatttggtgagtcttgttgggtattgtgatgaaggagaacacttggctcttatttatgaatacatgccaaatggagacttaaagcaacatttgtcaggtaatatcacatatataattgttttcttaataaaacctaaccatgatataatttttttttctgaataattaaagatcataactaaattgatatgaagtgtgtttaattgatacaggaaagcatggcggattcgtcctgagctgggaaagtagactaaaaatagttttggatgcagcactaggtattcattaaactttaagacaaatgtttagttaataattacagcttttatgggtattagtatggcctcgaccggatcagaaaggaaccatatgatgatatcgaaattaatctccattttccaataaacgatggtattaaatttaatatgtaggattggagtatttacatactggatgtgtaccaccaatggttcacagagatatcaaaactacgaatatacttctagatcaacatctccaagctaaattagctgattttgggctttcaagatcttttcccatcggaaatgagaaaaatgtgtcaactgttgttgctggtactcctggatatcttgatcctgagtgagtataacttcatatgttagttccaaaatcaccattccttttttttactttacaatcacaacaatttcttgttttgcaggtattatcaaacaaattggttgacagaaaagagtgatatatacagtttcggaattgtactgttagagataatttcaaaccgtcctataatccagcaatcccgtgaaaagcctcacatagtggaatgggtcagttttatgataacaaaaggagatcttagaagtattatggatccaaacctccaccaagattatgatattggttctgtctggaaggccattgaattagcaatgtcatgtgtgagtctttcttctgcaagacgaccaaacatgtctcgagttgtgaatgaattaaaagaatgtcttatatccgaaacctctaggataggtgagggacgagacatggaatcaaaaggttcaatggaattcagcagagacatttataatgaggtaatacctcaagctcgctagctcgtcaaaatttattcttgctggtttttcttctcatgaatattcaaatttgtgtgtttcaagagtgtctttcgccaataataactaaggctttcactaataacatgtaatactgatgttgaattgtcgtagtgtgatatatattttgtgaaatacatatggtgaaatttattgaaattatttcatgaatttgtaacccacaactaattctcgtctttgtttctatctcaagaaatgcattaggttgttcccactttcggtattttgaaaaccaaaggaagagttgaatataccaaaacttatgtatttccttcaaaacttaagagctgtttatatttccttcaaaagaagataaataaagaagatataaatggtctaataaaccaaaagttggtcaaaatttagtctaaatataaaacatgaacgtaatagaacttgtttacaagcgtatatctcgttgatcctgagtttaataagatgtataatagtaaatgttacgaagaactccaataatgaaatatcacaagacagatttatcttgtggagagggttcatcatgtaaatgtttttttttttttcaccatgtaaagttggtaattcttgttgtatattgttttaacgaagacacacttcgacctagtctagtacacaaccagtggagatttaaaacaacatctatcattcaaattggacaaagaaataaccgaatccaaggaaccttgcattggatttaggatttatgacaaaaattcttcgcaaaatgtttccacgccaacctctctataaataaagggccacaagaacatgcatgagtgagaaaaatacattttcgaggcgggaaagatagactaaattttaattttaattgtaattcatagcttgaaattttaaaattatacagctacttggctcctttatcaaacaacgtgcaaaagtatagtgattttaagaccacgattttttgtgccactagagacgtgcttgcatctttagaaatggacattttaattttatgggagaactttccacaaccctaactgttgaatatatgttctaaatgctaattttatccaagtttgcctcttttatttatttttgtatccttttaaactctttttattcgttcatatatgtttcctttccggctgctacatttcaagaggtcgagcagaccataactctatcatttatcttagttaattcatatacataggaaccttggtagcttcatctttcaaaatggagggtcatcgaggattattgttggcactgatagtcaacattttttccattgtacaccttgttcatgctcagaatccggaaggtagtgtatcgattcattgtagactttatacatgaaattctgtttacatcagaaaatccacatttcagatctcaaatttctaatactttctctctctttctaggcttgtatacatacaattctgtttacatcatttatctttcagaaaatcaatttttcagatctcaaatttctaatacttttttgctctttcccttgaggcttgtggcctgtcgtgtcaattttgattcctttaaacaaaaacaaaaaaaaactccaccttacagttgtcatgtggttatatgtaacttggcaggatttatcagcttggattgtggtttacccgccaaagagtctccttataccgaaagcacaacaagcttggtattcacctctgatgcaaattttatctcaagtgggattagtactaaactcccaaaacatgatgactacaagccatataatttcttaagatattttcctgacggaacacgacattgctatgatttaagtgtaaagcagggtactaattatctgatcagagctagcttcgtatatgggaattatgacggtcgtaatattatgcccagatttgatctgtatatagggcctaatatatgggcagtagtgtcggagttggacctatacagcccagaggaagagatcattcacatgacaaagtcaacttctttacagatttgtcttgtcaaaacaggaccaactacacctttcatatcaactttggagctacggcctttgagaaatgataattatattactcaatctggttctttgaagctcatgcagcggatgtgtatgaccgagactgttagcacactacggtaagtcaactaaatctggtgatattatttgcccaaaaaagtgaacacatcaaagtatatatatattttttttttactcctctcgctaatgcaaagcatgtgccaggtatcctgatgatgtctatgatcgtctctggtatacagatggtatatacgaaacaaaagcagtaaagacagctctgagtgtcaattctactaatccatttgaactaccccaagtcataattaggtcagcagctacgcccgtaaatagcagtgagccaataaccgttgaatacggtggatattcctccggtgatcaagtctatttgtatctacattttgccgagatccaaaccctaaaagccagcgataacagggaatttgatattgtgtgggctaataatattaaaaagctggcttataaacctaaggtatcacaaatagataccttactcaacacatcaccgaataaatgtgataatacattttgcaaagcgttcctagtgaggactcaaaggtcaactctaccaccactacttaacgcctatgaggtctacattcttgtggagtttccatactcagagacacatcccgacgatggtatgttttccaatctaataagtatttatttttatactgattaaaatctccaatcccttatgtgttactcttaaggcactactataacgttacttctacaccagtcgttgctatcaagaaaatcaaagccgcttatggattgaagataatcagttggcaaggagatccttgcctccctagagaatataagtgggagtatatagaatgcagctacaccaataactctattcccccaagaatcatttccttgtatgatcactttctctaataaccctttgcagctgaaagcattgtctcttaaagtatattttatcatataaacagagacttatcaaaccgtgggttaaaagggatcatagagcccgtcttacaaaacttaacccagcttgaaaaactgtaagtgtgttcttcgtaattagtagctgtacctgtagttgaaaagctttttctgtcataagttatggcacccgttttgtagttagctgacagttctgtgtatctgtgaataattgcatggactaattgcattcatttgtaaatcatagtgtcctatgatctgcaacacggcctttatttgttctgtaactatgtttttgcatatcgtatggaaatatgcaacgttgttctatagttagactaaccaagtgactttttgtataaattttagggacttatcaattaaccgtttatccggcgaagtgcctgagtttctggccaacatgaaatcattgtcgaacatgtaagttgtttctatacaatatgagattccaacttaaaaccaattggcaatgagtggattgacacatatctcttatacactagatcctttgcccctttccaatgtgcgatattgttatacctagctaccagtttcctccaaaatgagctaattgacaactatttgcttcataattttaaaacatattctggctaaatatttacatgtaccctttatctgccttgatagaaacttaagttggaataatctaaaaggtctgattcctccagcccttgaggagaaaagaaagaatggacttaaactaaagtaagtttaattaaaaaaaaatcaaatttatgcatctccgtcccatcatttctacttggtgtttctccatgacacttttgctttgtacgtagtactcaaggaaatcaaaatctatgtcctggggatgaatgcaaaagaagcatcccaaaatttcctgtaacaactgttgtgtcgatttctgcaattctgcttactgtagttgtgctacttattgttttcatttacaaaaagaaaaagacgtcaaaaggtacttacaagatgagatattctacaatatctatataatgatcattagtaattgtacctcatttttccaatacagttcgtcacagattaccaattactaaatctgaaatcttaaccaaaaagagaaggtttacatattcagaagtcgaagcagtgacaaataagtttgaaagagttataggagaaggagggtttggaattgtgtatcatggtcatttgaatgatactgaacaagtagctgttaaacttctctctcattcatcaactcaaggctataagcaatttaaggcagaggtacttttagcttgctttggaacaaatccacacagtataatttttattaataaaccaatatggcctatgaattatgtgctttcatggttgatcaggtagaactgcttttaagagtccaccatacaaacttggtaaatcttgttggatattgtaatgaagaagaccacttggcccttgtctatgagtatgcagctaacggggacttaaagcaacatctttcaggtaaatatgtattcaaccaaattgtttagaaaagataatgatcctttgtcagattttgatggtactatacatattttcatattacactggtttacaagaatttgacattaataacgcggaacaggagagtctagttccgctgctttaaattgggcaagcagacttggaatcgctaccgagactgcacaaggtatatgctactttttgctaaggagttacttttttcttttatttttaacgcaaagagctaaaattgttgttcaaatggattttaacacaacaggattagagtacttacacattggatgtgaacctccaatgattcatagagatgtcaaaacgacgaatatacttttggacgagcatttccatgctaaacttgctgattttggactttccagatcatttccagtaggagttgaatcccatgtatcaacaaatgttgctggcactcctggatatcttgatcctgagtaagtagatttggtatttatactaaaagtttattactttctcaatggttatgatagttaaaatgaggcttattttgcagatattatcgaacaaattggttaactgaaaaaagtgatgtatatagtatgggcattgtcctgttagagattatcacaaaccagcctgtgatacaacaagtccgtgaaaagcctcatatagctgaatgggtggggttgatgcttactaaaggagatattaaaagtataatggatccaaaactgaatggggaatatgactcaagttccgtttggaaggctcttgagctagctatgtcatgtgtgaacccctcttcagggggaagaccaaccatgtctcaggttataagtgaacttaaagaatgtctcatttatgagaactcaagaaaagaaggacgatcagaagtagactcaaaaagttccattgaactgtccaccagtttcaccgctgaagtgacccctgatgcacggtaacatctaataagaacaacatctttcatgtaattatttcttgtattaaattttgattttaaacaattcaaagatccaggcaatgtaaattaatgggttaaatattgaccagaagctatttcataccgagattttttgtttaaaggttctacgaaacttaggaaccaaatactcaacttctgtatttttcacctttcttctttggagttgctacttcagtcttgatatgcatcaagaaatgtatctgaaattttttgttcgtttgcaaagcatgattttgaatgataatgctggatattgaagtaaacaacttattataaagttacacagtaacaatacatcactcctgaccatttatgtttcaatttcatgttgttatttcgatcgcacttcaatcaatcaaaacatttgcgactaatttaataacccatagaggaataaatgttgtaagcacgtcgtgatcatggtgaccaattatctcggttgtgtatgttctgtcaacaatcttttcataatcataagtcaaaagtcaacgatcaaccttaatccttgacttgaaaatgaacaagaaatatatcagacaggcgatatctgttttcttgtcataaacacctaaaataaatggagagtcttcaagaccttttgctagctctgatcattttagcttttgccactacttcacatttcattctagctcagcctgatccaaaaggtacactcttataaacactttcctctttacaagtcttgaaattttacatttttcgttttctcttctatatattcgacatgatttttatgtcgcctcttaccagaattcattaacttggattgcgggtaacaccctgcggtatcgccttataccgaaccattaacaaacttaacatacctatccgacgctaacttcacccaaggtggtcaaagtggaagagtccaaaaggtttgggaagaagcttatcagccattcacagttctaagatactttccggatggaatacgaaactgctataacttgagggtcactccatccacaaaatatcttatcaaagctctctttctctatggaaattatgacgggcttaacaatgccccgatattcgatctgtatctaggtcctaacatatggacaacggtcgatttgaaaagctctttactttctcaaacggaagagatcatacacatcacaaagtcaagctctttggagatttgtcttgttaaaacagggaagactacaccaatcatctcagccttggaactaagacctttgagagatgacatttacattactcaaattggttccttgaagctcttaaaacgctattatgctagcgattttctcggtccttcgattcggtaatttaactttacttgctttacaagaaacagagttttgtaattttgttaatacaaataaaggtttggtaattgttgtttaatattcaggtatccgtcagatgtatatgatcgtgaatggaagccaataagtctttcgtttggcttgaatttcgtaaacacaagtctcagtgtgaactcttccactccttatgagctaccacaagaagtatctcaaaggcaatcattaacgaaaacgtgactgagaagttatctttcgactggtatgtcgataaccgcgaggatcaagctctcatataccttcatttcgctgagattcaatcacttaaaggcaatgacacaagagagttcgacattatatggaaagggaacgatggaaacattaccatttcagcttatcgcccttcgaagttacagctagagactctatacaacacatcgcctatgaaatgtaggtttatgcaatgtacagtggaacttgttatgactaagagctcaactctcccaccaatgatcaatgctatggaagcttaccaaattatagagttctcagatgcagaaactaatccagaggatggttagtcaatcttcactactaatgaattttcgcgatatttttatatgtttcggtatatttattttggttttatttgcagtcgttgcggtccagaatattagagctgcttatgaattgagtagaatagactggcaaggagatccgtgtgttcctcggttgttcaaatgggaggggataaattgcagctacacaaatacttctattccaccaagaatcatttccttgtaagactatttaataacagatttgattactattaaaaatcagtgtttaaatctctaaaattgtgtgttatgttcttataaccagagacttatcatcaagtggactaaatggggtcatagcacctagcatacaaaatctaacacatcttcaagaactgtgagacaacaatatatatccttttaaactgcatttattttgttagaaccttttatatttattattaattgttatcgtaatcgattgatagggacttatcgaataacaatctaactggaggagtgcctgaatttctagccaacatggaatcattgttgatcatgtgagtttatttcatggtaaacaataagtgatcatgatttcttgcaccagatttatggatgatgtttatatatatcataatgttcttatctgttttgacagaaacttaggttggaatagcttaaccggtccaattcctcgagcccttcacaatagagaaaagaaagggctaaaattggtgtaagatttctccttaatggttttttttgttcgtgatgattttgcgtattcaataacattcttgttctatagtgttcaaggaaacccaaatctatgtctctctggctcatgcaagaacacgaaagtcctagtgccggtttttgcgtctcttgcttcattggcggctcttatcgctttgttggctctcatttttgttttgagaaggaaaaagcccgtatcaaaaggtataaataaatagattcatcaatcaagaagtacataagggcttaatactctgtaaagttcatggtatgtagtaatggcattacttatatggcctttccatatacagttgctacacgggagttaccaagaaagtcatcaatctttgccaaaaagaaaaagttcacttattcggaagtcgttgagcttacgaataacttcagaagagttcttggagaaggaggcttcggagttgtctaccatggttctttgagtgataccgaacaagtagcggttaaagttctttccgagtcatccgttcaaggctataaggaatttaaggcagaggtatgtcaatattttgcactagttaactgaaaaaaaaacttgctggtattgagagtttaatataatatgaaatggacccaaaaggtggagcttcttctaagagttcatcacataaacttggtaagccttgttggttactgtgatgaaggaggccatttagcacttatatatgagtacatggctaatggagaccttaaacaacatctatcaggtaattaaacactaattatacttgacatgtctttattcgtctttgaatcaattaataatgtctttaacttgttataaggatttagcatttttatttacaggagaatcttctggacctactttgaaatgggctagtagactcaaaattgctatcgaggcggcacaaggtttaatcttgctaactttaacatttccagtcacctttttataacattgtgatgacattataaagttcttcaacttcatatatcttccaatccctttttggcctaccaactttgctataatcactcactcaacatggatacaattttttaacaataggtttagagtatttgcatgttgggtgtgagccaccaatggttcatagagatgtcaaaagtacgaacatactattagataatcgtttcgaagcaaactcgcggattttggactttcaagatcgttttctgtcggagctgaaactcaagtggcaacggttgttgcaggaacacccggatatcttgatcctgagtaagttctctaattcatagacagctacataatgtaacttgaacttgtttttttccttcattaagttccataaacttcaacttcttgcagatattacctaacaaattggttaaacgagaagagcgacgtctacagtttcggaatagtactcatcgaaatcatcacaaaccgatcagtgattgaactaacccgagaaaaagctcatatagcagaatgggtaaagattcttataagcagaggagacatcgaaaaaatcgtcgacacaaaccttaatggagattacgactcaaacacagtctggaggattcttgaactagcaatgtcatgcgtaagccactcttcatcagatagaccaaccatgtccaaagttgttaatatacttaaagagtgcttgctctcagaaaatttaagaacaagacagattcatcaagataatgacgatgactcaaagaactcagacttgactttaaatttcggaactgaagtaacccctcttgcacgctagtctcttacacgaatctctttttttttttttttcaatttatgttaattatagacttctttttcttgttttttatatgaattcattctcttatatttttttttcaaatttgaacagatatatagataaaacaaaactttaaaaggaaaaaaaaacgaaaaagattttgtaattttgttttgtttttgttccatcaccattattgtcacgtgcgtggcacagaaactagaaatatataaaaatatatatatatttttttccggtggtatagatctgaatcagagaattggtaagtagtaagaaccctagctttagattcgtcagattctgattactcgaatcaaagcagggtttttgacactaaaaatccgatctcgtgaagtgtgttttgcatcgaatcggaaaatatgaaagaagggaaatcatcgaagtcgtcgagtcaacaagagcagcatgaacagatttatcatcaaaacagtcacttgggttctttcaacttcgccaaattgtttgattctgaagcttcctgggacaaggtattacactctccttcgtgctctctaggttctatacaaccgatcccagaatctgttaacttttgagttcgtgttgcttacttttaagattcctcaagccatataatctggtacataatcattttttagtaattgagagctctaaatttagtttatttctcctgtgtacacaattagttgtagcatttgaactctaaagtttaaatttttctcttgtgtacacaattagttgtagcatttgagatctttaaagttgatatctttctcttgtgtgcacaatcacttgtaggaattgagatctttaaatttggttttttaatcttgtgtgcacagttagttgtagcaattgagatgtaaagtttaaatgttttctcttgtgtgctaaatgaattgtagcaattgagctgtaaagttgatttcattctcttttgagttccttacactgctgttttagcccatcttgtatctcgatgactataccaacttgttatcgtttgaaaaggaatgaatacgtttccgtatttgattgctatagctgattgtgctttgtgttggtttatactttggaatcggttcgagtggtttttaagtttgtggttgtttgtttggataggatcaactgggagatgtgttgcattggatcaggcaagtagttggtttactctgcggattgttgtggggtgcgatacctttggtaggaggcatatggcttcttctgtaagttctgtcatttatcttcttactgtgtccactatgactagaaagaactgaaactttgtgcttaaactcgagctatagttagtagaaatccattgtgtctgatgcatgaaatcgaaccatctactatatcgtttggtttacctggcgttgttctatattactgatcagaaaaatccatcactttgagatgataataagctacaccaattattaatgtcgttatcagtttttcgtaacagagaaacaactgtcagtatctgtttttattgcattgattagttaggtatttactttgagcgtattttatctacaactgttttcggtgacattcatagattttgagttatcggttacaatcatactacatagcaggcctttcgtgttgagttggtttgtcttaacaagtagcatcgttgactgtaaaatttggcagatttcttgcaatctcctctggcatagtatatggttactatgcattggttctaaagatcgatgaagaagacttcggtggtcacgcagctttgctccaggacggtctatttgcttctctaagtttattcctggtatgtagatttcttctctcttcctctctacaactctctagtttaagataatccctagattttcttccatcttaaaagttgatttggttgtgattgaattacatttcagcttgcgtggattctggtgtatagcttgtctagcttctgatagagacacagtatctcgcgcttgagctgctccgtgaagaagtttagcagaacgtacctttcatggtttctccaatttacgatgtgcccttcatgcttttgttttctgaagatgggaactagcattggtagattttcatttttctgatggaacttttggtttccttttgttcttgttaattactttgtgtaataaaaatgagtattattatgcaaggatacagtatgtgtttagtacaaaactattacttccattactaaaaatttgggacaaaaagcctcactgattaatcagggcgaagttgtcctgacgaaagaaaaaaaatctcagtaacacaaaaaaaatgcgtctgccgggagtcgaacccgggtctattgcttggaaggcaattatcctaaccgttggactacagacgcttagatgttcattttatcaactctttatagttaatattgtatttagaagtaaaacaaatttacgtatttaagtccatgtaattaggttatctaagcaagtagtctttcatatacataggcatgtaatgatcacaatgtgactaacctagagagttaccacatttgttctcttcctcactttacatttttgcacaataaagctccattgatctatgtatgtcttttctatatcattaacttcaaataagtcctttcttagattatcctacaaatttatcacacattctttcaccaaatcaaatagcactataatacacattttgtaaaacacatcaagttattttatataacactacgctaatttttacgaccatgtgaaaaataaacaatatagttacaatttttccaccgtgttagttatgtacaattttgatgaaaatttggttttctaacttacaaaacctttaaatctcaaacaaaaccaatttaagaaaataaggcctcgtgacttctttctacgatgacaatcacaactacattcacttgtctcccaataaaaaaaaaaaaaacacacaaacaattaaggccgatcgaagtaaggatcccactcatgcctctcaacattcccaaacacattatatttccaagaatactgctccggaaaatcaaaaatctcctccttgccttcctctatcctcttccttaacccctccactctttccaaaactccttccaccgcgacatcgaatgcatcttcaaaccttcccgtgtcttcactcttactcgacgggtgaaaatacattaacctcggtatcagtcttatcacttgttctctcatagcgaaaacttttgtcctcggtattctactcaaaacattctctatactcactttaccttctttcacatttttctccggaataaaaacagagtatttcgcgatatctttcggtaaatgccaaatgtattgcgcataagctgatcccggatgaaagaaaactggtatacaacctgctaagatggagtcaaaagtggagcgacgtgtgtatgagtcacctggtggttgaagacagaacgttgagctcaaaaagaatttcatgatttggtcgggtttgtagcatttttgagaacccgatatgcattctagaagcttgcattttcgttttgaagctttgcattggtccatgatctcggttcttatgctgtcaccgaggtttggtcgtggggcaccgacaaatgagaataagtaacgacgattaattcttctcattctcatctgccattggatgatttctgcgtatgttgaagggtggaaataggtcgggtaaggaaccgcgaacccgtggtagttccatgggcttgattcgattagtagcatcgtcatgtttcttacttccggtaatatcattaacctggctaggtagatagagaaacaacaatgagaagacttgtccaatgaaaaacaacttaaaacattcatgaaattctgcaagattaaagtcaaaacaataaaagaattctttccttaaccatttgtgattccattctatccaaaatgttaccagttttttttttttatattttgacgttttcaaaatatgaatactgtatatgcaactattttaccatacacataattcatcaagttttcatcttttctcgttattgaaatgcaatatagtataactagtaaaagcaaaaagctatcgatcttttaactcgttttttgtgatgtatgaaatatgagtatgacattcattaaaacatcaaatagtatggtggcgtacctatttccccaatcggattcattctctggtgtacgcataaagtcccaagtggttcgaccagccaccataaaatgatctcgtccgtccatcctcttccactcctgactctccctcagccacttcatgagatcaagcgcggcagcatctctcatgaaagggaacggtccccacaaaaaccgcatcaagtctaaacccggatagtaaggaacatacaccgcagaagctaaagacgagtctttggtcaagcacttgtactgcttcatcctgttgtggaatattacttccaatgtgaactggtttgtggcataccaaccagaaactccttccatgtttggtagacgagggcctaacccgaaattcgacgttaactcgcacatatcagtccacctgctcaatgtccaacagttcttgagaagctcttcgttaaacaaagctggcacctcatgcatatacacatattttcctttacatggatcgttacttcgcgtttctcttggccgtaacataactttaccgactctactaggttggtttctcttggaaattactctgtttttcgccttggaagtattattcttattcaatacaaaatttctctgagtttttggttcagatttagagatgttatccttgcctttcttggtctcaagatcgtcgtcattatcatcttcaacaacattactggaagaatcattcggcaactccttgcctctcttggtctcaagatcgtcgtcattatcatcaactagcgctttctttggttccacgtctttcttagcctcgaaaaagttcggttctttgtctaatgcttgatgattctcatcactattctccgcattgctctcatcagcatcattacgacgaacccttttcttctctgcctccaatctacccgaagatctcgcctttcgtggctctcgatgtcctctccttgccttagatgaccgtccaattacaaccgaatcaactctcttcttctcattttcaaccctttctttctcaagttcttcaacgagatcagtcacaaccttcttgtcttctgacatctgatcatccggaggagaatcgacagaaacaggaagagagctgttatcaacggaaatgtcctcagagacaacgttaacgacaggagcttcatcaggttcgtggttttgtgggacgttttcgacagggagatcgatgatattttcttgccggaacaatctctcgtggttatgaacggttttagcggaagaactaaaaaggtaaagcaagacaagccaaaggaggaatgaggccattgccacgtaccagaactgggttctgtactttgagctagacttctccattgccattgttcctcctctcctatgtggttttctcatgcattaattaaccaaatcttacctaccaatacccgatttgttgcttgtgatgcaagaaatcgttaaagattgtgttgatttctggatctgaaggatggatttaggggaaaatggatggatctctggtagatttaggaaatgaatggacgctgtgagagagatggtgagattgggatggttgttgaagcgttcaaaggttttgtagtgattaatgaaaagatttgtttttttttttcaataaagcgataattaattacatatggagctattgttaataatcaagatttcctcgtacatgtgtccttaatatttgttcaggcacctaaatgaatcaaagattgaattgaattagagagctaattagagatttttaaggaatgtaaaagatttacaaatctgtttttttaattctaaagatttttaaagaattatttgggtagaaattaattacaaacccaaaacagaaagcatcattgtcttttttaccaaaaaaaaagcatcatcgtctctaatatatgaaaccaatagtcaatgacccatcaccattgttgatcgattccttattattgttaggtttcagtttcttaatctcactccagttaatcacaaactccctgattcaacctctctttgcttctaccattggttgtcctttttccaccactaattctctggccaaagtcttgatgtttccccagagatgtcaccggtataacactccagtttcaggaatatagtgatgcatgcgaagaattttaaaagaatcaatttggtcattggtgtcactaaaatacatttatcttttcgggtgtcactaaaatgcatttatcttttcggtcaaatgttctcaaaaatactctgaagttaaacgtgtttgagctggaataatttttaggtgagcgaccttccgaaaaataattattgtccaaaaaagaaatatgtacatcaaagagtgtaaaagatttatcatgtcatgttactatattagcagaagatagtgtgttctttttaaaaatttattatcatgtcaaaatttctccatatacgggaatgcatcgggacaatttgtaagtttcaatttgcactgttatttttagcgctaataattccgacgaatattgatgtcactaagaatagtatcatacaataaatgagtagatattttatcagttaccattatctaaagtacccataaatgatgctaaacttttttttctttttcctacttttacgtcgtttataactgatgtaatttaattgatgccagatcctctttttcgagattccttgaacctcataattctatatatttcccaaattttcagatttatcaactaaaactactctacatattaagaaaacaaagaagaaaaatagctatggccaaggcagcttctacacttgtttttcccatcattttccttgttatgttcgccttaagtacgcattttatctttagaattattcgtcaaaatattcaatcatcttcttttcttcttataaacatagtttttattgtagctatattaattgggttataccctatatgatgtaatccattgctatctttttcttaagtgtacatttaatttcgggctttcttcattgacatatactcttagggttatattagttccttgctatgatttctttatctcaagctttttttcttcaaaaattttatattcacaatattcattggcatatgccctaaatgttgtagtccattgtgattttagccatgcataaagtatcgtttgtatcaatggtttgctcataccaatatcttaaaagttttcacatatgatctactataatttgtagcgtcggctctattcattagcatgtagcagaaatattgtaattcagtgtaatgacatctcctaagttctagtaaatattttgttatctaaatatagaacggttttgttggttatagttgaacaaaatatgggatgcatggcggttcttggctcgtgtggtgtcattacagattgcagtgggtcatgcaagactaagtttggacaagatgctagtggcgattgtgaccgtgacggtggtcaaggaacatgtatgtgtggttatccttgtccacatgataagctacatatgtgagatctacaatactttgaaatctatatttcttcaaaatgtattaagtagaaatcaaaattgaaaaaaaaataaaatcaaaacagtttgtgctatggtctctcataatctttcagatggaacttttgatatcaatgaatgttagataacataacaaaatgcttgagaactgaaagccaaaattgggagtataatccggataaataaacgaatctgatctgaactaaatcaaaacaaaatactcaatctgaaaagtaaaaacgaaccatatatcttaatctaacttatatgattttttttttctatatccgaaaacccaagtcggaaaaataacgatattataccgaagtttttcaaaaatttcaaaaattaagcttatattttgactaaaatatgaatccgaacataaattttagtttgaataccattattcattttatataaagaatcggacaacttgaactgaactctagaacacccctagctaaaatgcatctttacattctttatgtttttggacaaaaaaatgcatctctcgctctcggacaaatgatgcaagaaatacttgtagtagtactctttttggatccattattgcaaacttaatctcgagtaaaatgaaattattgataagattttctctaacgtttcaagatcttgtctataataattatacgttaaattattacgattattttaaagtgtttgacggttttagaagctaagtcaaagtttaacatttggattcgaaggaaaggaacatattttctgaattttacaagaaacagaaaggaatattttctattttcaactctactactaatatacaaatacaactatataataagattcattgttgatcatgtgattaatcaacaaagctactgttgcgcaattaatattcgaatctctaaactcatgtgatttaaaccaagattaaaaactatatattataaaatttaattatttgttacctaactttaaacatattttgtcttaaatccaaatttaattagcttgttcacaaggaaatgcctcaaaagaggaaagacgattgattcatctcaaccttctcgtcttctttcggacaacaatgtcacaaaaagtctgatcctttctctttagatttggcttcgagaaatggctcgcgatcggcgggaaggtctggagatcaaggtggtgaatccaccggcggcggcgacaaacaatgtggctgtagaaacgtctccggcgacggcgacgaggagacggagacaacaacaacgagcttcgttcgctgagtttagaccgtttaagctttggtttccatggcttgttccagctatcgtggtggctaacattgcccttttcgccatttcgatgtttattaacaattgtcctaagaactcggcttattgcttagctaggtttcttgggagatttgcttttcagcctatgaaagagaatcctcttctgggtccttcttctttgacgtgggtaaccttaaagatctcaactttatttcttaagattccacatttgattgagattcgtgtctctgagtttgaaatgtggaaactttttttgtttctaatgattggatttgttaaaattatgatgggttcttaaaaagttcattactttgtacaatttgaattagatcttagattgtggggcttagaatgaaatttggtgaaattatacttgtggcattgcattgtaacagtaaatatcaagtgttatagttatgtgtattctttgataccagattggagaagatgggggctttagatgtatcaatggtggttcataagcacgaggtgtggcgcttgttcacttgtatatggctacatgctggggtttttcatgttcttgccaacatgttgagccttatcttcattggcattcgacttgagcaagaatttggatttggtatgcatcatgagttggtttatgtgccaaaatgtgtatggctgatgctgaaagacttgctttttatttactaattctcattttctttgacagtacgcattggattgctttatatgatatctggatttggtggaagtttgttatcttctctatttaaccgggctggtatatccgttggtgcctctggagcattattcggcttgcttggtgctatgctttcagagcttctcactaattggactatttacgctaataaggtagccaaatcttcccttgttaaacaagccgcactttcgatgaatgatgtgtcaataatgtcattggtttttctacatttgcagtttgcagctcttttgacactcatcttcatcatagccattaatttagcagtaggtattcttccacatgtagacaactttgcccatcttggaggattcacatcagggtttcttctaggctttgttttcttgatacgtcctcagtatggatacttcaaccagcggaacaatcctcggggttatgctgcaccgtctgctaaatccaaacacaagccataccaatacgttctttggatcacctctttagtgcttttaatagcagggtatacttctttttctttcatcatgattacaaaatgaaacagattcagtcaattctttaatgcaaatttttgaaaatttggtgttagatataccgctggactcgtagtgcttcttcgaggaacggatctaaacaagcattgttcatggtgccattatctcagctgtattcctacgtcgctttggagctgtaaatctcaaaatgtctactgtgaggtaaatacttcttatgctctttagtctttatctaccatgtctagtttgatcccaccattcttgttttgtgttaatacttaaaagaagacactagtcttatgtgtgtgactaatcttatgttgtattcgagtttataaaaactgagagtgattgtggaatttggtgcagtcgagccaaattgggcagcagatgaacttgacatgtatcacgaatgggaaaacagagatgtacaagctctctaacgatataccgtctcggattcagcagttgtgttcccaattgtgcagatgaataccactaaacgtctaatttttatactcttgtagaaagttaggaatgtgtcttgaggaagagaagattgttcatttaacatgatcatgcacttgtggattcttctttctgatcattgtttgtttccacttcttgttttattgttgcatatgtattgaccatgatctatgtaatgagaacataggtgaagagaaagttgaacaaagtttttgttcttaaacattttaattataaattcagatgtttaatctaatcttaaatttcttttgcatttaagttgcataaaaatgaaaataatattttgttgtatatcaaatcattttatatatttaaatgaaaatttattagtgtaatagttatgtcaaatgataaatgtaatttactatcattcgcaactttcgaatttccaagaagaaaattatataattaatttaaaaattgaaatttgcttacttaaaagttaaaggagtctaatcatattttattatttcatacgtatatggttagtgcgaatacgaaaactccactaatatcttcttcatttttatatttttacgtacatgtgcgttgaatttacatgataatctataaggctataaccttatcacaagacacaaatcattattaactatatgcacaaaatagaataaataactatatggtaacttttttaaaacaaaattttgtattatataaaaaaatccagttaaacgaacatggaatatattagtttttgaaaagtattgttatgtagtgtagtataagtttggacgttcgagtattcgtttctgttttagtttaataccattgtatttcgattatttcaattttgaagtttaaaatctatataaacaccaaaaaatttggttatgttttgatttagatttggttttttttttatttagaaatctatgatccattcggattttttttttttggtgcaatagttttagatttgttatttgtatttagtcattactttcgtcaaaacatatttaatgtttaaatgatcgctgatatgagataaataaaaatcaagttaaaaaaatcataaatatatctgttaccagttaccaccaattcgagaaaaatcttcacttttctgtcaccgatccaatcctattctttttttagagcattaaactcttatgtattctaacgtagttttaactttaatgccaattccacccatcgtaatgttaggtcgctcggtggattatattgttgtttatccattggttgttactttgaaaatttcacaaatatcagaatcattatttgaatctttatttcataatcgttgatcttacaattacatactcaaagtttgacactagctagacttaccaaaaccagttggcgccaaatcgcaaaatagaataatcatatgattatagtaatttttttattctgattataaattcaaagaacgtcggaaatgcctaacaaatttcctgaccaagtggatttatgattcatataaagaggacaaaggagtgtgattaaacaaatgtaaaaacttgtatctatcttctatttattattctctatagttttatacataaaaaatacttagtctccaccacttacacagatcattttcttctccaacacaaagctttcttcttccatagcatccgaatcgtcgcatcttaaacctcctaaacaggtatgcttgtaacttttgtttcttaccagaactaaattcactttgttaatttgtgattagattctctgtttctttccggttactaatcttgatcagggacaagaatttgtttttgtgtcggagactaggaatataacaaggatttttgcgttttcttgtgtaacaatttttagggtttattagggttcttgatttcatcaatgggttcttactcagctggcttccctggatccttggactggtttgattttcccggtttaggaaacggatcctatctaaatgatcaacctttgttagatattggatctgttcctcctcctctagacccatatcctcaacagaatcttgcttctgcggatgctgatttctctgattctgttttgaagtacataagccaagttcttatggaagaggacatggaagataagccttgtatgtttcatgatgctttatctcttcaagcagctgagaagtctctctatgaagctctcggcgagaagtacccggttgatgattctgatcagcctctgactactactactagccttgctcaattggttagtagtcctggtggttcttcttatgcttcaagcaccacaaccacttcctctgattcacaatggagttttgattgtttggagaataataggccttcttcttggttgcagacaccgatcccgagtaacttcatttttcagtctacatctactagagccagtagcggtaacgcggttttcgggtcaagttttagcggtgatttggtttctaatatgtttaatgatactgacttggcgttacaattcaagaaagggatggaggaagctagtaaattccttcctaagagctctcagttggttatagataactctgttcctaacagattaaccggaaagaagagccattggcgcgaagaagaacatttgactgaagaaagaagtaagaaacaatctgctatttatgttgatgaaactgatgagcttactgatatgtttgacaatattctgatatttggcgaggctaaggaacaacctgtatgcattcttaacgagagtttccctaaggaacctgcgaaagcttcaacgtttagtaagagtcctaaaggcgaaaaaccggaagctagtggtaacagttatacaaaagagacacctgatttgaggacaatgctggtttcttgtgctcaagctgtttcgattaacgatcgtagaactgctgacgagctgttaagtcggataaggcaacattcttcatcttacggcgatggaacagagagattggctcattattttgctaacagtcttgaagcacgtttggctgggataggtacacaggtttatactgccttgtcttccaagaaaacatctacttctgacatgttgaaagcttatcagacatatatatcagtctgtccgttcaagaaaatcgcaatcatattcgccaaccatagtattatgcggttggcttcaagtgctaatgccaaaaccatccacatcatagattttggaatatctgatggtttccagtggccttctctgattcatcgacttgcttggagacgtggttcatcttgtaagcttcggataaccggtatagagttgcctcaacgtggttttagaccagccgagggagttattgagactggtcgtcgcttggctaagtattgtcagaagttcaatattccgtttgagtacaatgcgattgcgcagaaatgggaatcaatcaagttggaggacttgaagctaaaagaaggcgagtttgttgcggtaaactctttatttcggtttaggaatcttctagatgagacggtggcagtgcatagcccgagagatacggttttgaagctgataaggaagataaagccagacgtgttcatccccgggatcctcagcggatcctacaacgcgcctttctttgtcacgaggtttagagaagttctgtttcattactcatctctgtttgacatgtgtgacacgaatctaacacgggaagatccaatgagggttatgtttgagaaagagttctatgggcgggagatcatgaacgtggtggcgtgtgaggggacggagagagtggagaggccagagagttataagcagtggcaggcgagggcgatgagagccgggtttagacagattccgctggagaaggaactagttcagaaactgaagttgatggtggaaagtggatacaaacccaaagagtttgatgttgatcaagattgtcactggttgcttcagggctggaaaggtagaattgtatacggttcatctatttgggttcctttgtagacagtttgttctcttgcatcccaaggaatgattttatatagggtttttctgttgatagtttcattgttcaggtttcttgtcttcttgacggggtttctaagttagggttactacttaggcatgatgccatgatctaaaaaaaaaaaactattttactttcaacattttaactttttaatgtttatggaaaatgttggataatggttacactacgttaccatttggataatttaccatttggtaaattactctatgttacttagttgcaacatgtaacgtaagtagcaaaagcatagataagtgaatttttgttttataactattttgttgaataacatatcgttgaaaaaattgtttcgtgtatctttatgaacatttttcttaatttttcccttaacaaaatttatggattttttccaaatggtaaattgtttagaaaaatgaattattccaccatagtattcctaaaaattacttcaattttaagattaagacccccaaaaagttttgaccttctggatcaaagaattgggccaaagcccaaactaaatttacagagatgaaataagtcaaccaaagtaccgaaccgtcactaatttctgtttgacttctggggacgagtctctctctggaccacttcttcgttcttgtaaaaaaaaactcatttggtacttttttcttagaaagctgtcctaaaagcttaaacactaaaacacatctgtaataataacccaaagatcataacttttaaacctcgtacatcatcagattcattcaaactgaggtaagctatgacatcaatctcccgtatttcccgtgtttactctcattcacatgtgcaattcaatttcggttgcttctggaatctaaagtttgaatttttaattcttcctttgactctctctgtttcgtgttcttcttcttctttttgtgtagctttttctatgtgggcagagcaactagggttttgatcatggatccaaacttctctgaatctctaaacggctttgagtattttgatggtaaccctaatttgcttactgatccaatggaagatcagtatccaccaccatctgatactctgttgaaatacgtgagtgagattcttatggaagagagtaatggagattataagcaatctatgttctatgattcattggctttacgaaaaactgaagaaatgttgcagcaagtcattactgattctcaaaatcagtcctttagtcctgctgattcattgattactaattcttgggatgcaagcggaagcatcgatgaatcggcttattcggctgatccgcaacctgtgaatgaaattatggttaagagtatgtttagtgatgcagaatcagctttacagtttaagaaaggggttgaagaagctagtaaattccttcccaatagtgatcaatgggttatcaatctggatatcgagagatccgaaaggcgcgattcggttaaagaagagatgggattggatcagttgagagttaagaagaatcatgaaagggattttgaggaagttaggagtagtaagcaatttgctagtaatgtagaagatagtaaggttacagatatgtttgataaggttttgcttcttgacggtgaatgcgatccgcaaacattgttagacagcgagattcaagcgattcggagtagtaagaacataggagagaaagggaagaagaagaagaagaagaagagtcaagtggttgattttcgtacacttctcactcattgtgcacaagccatttccacaggagataaaaccacggctcttgagtttctgttacagataaggcaacagtcttcgcctctcggtgacgcggggcaaagactagctcattgtttcgctaacgcgcttgaagctcgtctacagggaagtaccggtcctatgatccagacttattacaatgctttaacctcgtcgttgaaggatactgctgcggatacaattagagcgtatcgagtttatctttcttcgtctccgtttgttaccttgatgtatttcttctccatctggatgattcttgatgtggctaaagatgctcctgttcttcatatagttgattttgggattctatacgggtttcaatggccgatgtttattcagtctatatcagatcgaaaagatgtaccgcggaagctgcggattactggtatcgagcttcctcagtgcgggtttcggcccgcggagcgaatagaggagacaggacggagattggctgagtattgtaaacggtttaatgttccgtttgagtacaaagccattgcgtctcagaactgggaaacaatccggatagaagatctcgatatacgaccaaacgaagtcttagcggttaatgctggacttagactcaagaaccttcaagatgaaacaggaagcgaagagaattgcccgagagatgctgtcttgaagctaataagaaacatgaacccggacgttttcatccacgcgattgtcaacggttcattcaacgcacccttctttatctcgcggtttaaagaagcggtttaccattactccgctctcttcgacatgtttgattcgacgttgcctcgggataacaaagagaggattaggttcgagagggagttttacgggagagaggctatgaacgtgatagcgtgcgaggaagctgatcgagtggagaggcctgagacttacaggcaatggcaggttagaatggttagagccgggtttaagcagaaaacgattaagcctgagctggtagagttgtttagaggaaagctgaagaaatggcgttaccataaagactttgtggttgatgaaaatagtaaatggttgttacaaggctggaaaggtcgaactctctatgcttcttcttgttgggttcctgcctagtgattttagtgttgttttgttacaaaaatcatgtaattttaggattacgtctgataggtttagaagaaatcttagctcaatttctctcatatatttctataaaaatgtttggccattataaatgaacttgtgattataagtttataaccaccaccaaagttagcttattggccccactttaattctccacagaactaattaacccattgtatgaaattccacgtaggattttactgggtcaagtaacgagccaattagcgtaccccacgtgtatatatagttcctttttccttggaacctataaaagaagaatctcttctttcttcttctctgcaatcaaaacaacttttccaatttttcagttccgatctgctgccattgactaggaagatcttcaagcttcaaaactctataatcggatcttttattccttggtacagttgaagttgatcaagctctagttgaatttattgttcttcatcttttggattttaacccagtaaaagtgttcaacactgtcctgatcatctataacgttctcgttaagctattaaatctatctggattcatataataaggttccataagtttggattttagtttgttttaagttttttcgatgatcgcctttgatcttgttttctgcagagatcttatctttatagctttgatactttgaattgaaatttgtataggatcgtatgttattctgaagttgattttttttagctttttattttgtgcccacaaggtattcgatgatttgcctcaatgggttgcgttgtaaaccagaattttctaataaagatcagattttgaagtgtttttctttttcgtttttgtggcagtggagatatggatggagatggttctagctttgagcagtgttaccgttgttatcctgtcacattcattgacaaggtctgatattttttgtatctaagctctctttgatgtatctatcaagattataaagaaattctaatatgagacattttatatgcaggcacatcttgagaagggtgacaaaagtaaattactactctcttcccttagtctctatagatagtttctttatgatatatatctctgagaagacttgtgatctctgcagttatcatgcctccttccgctctcgatcgtcttggtgagccattaatactgtatcttctactgttatatcaatagtgtttggtctctgactccatcttttcagcttctttgcatattgaatacccaatgctgtttcaactgagtaatgtttctgttgagaagacctcacattgtggtgtactagaattcactgcagacgaaggcctagtttacttgccatattgggtatacttcttctttctctttgtttctttcattagtttcttacatctgatcttactttgttttgttggcattacttacagatgatgcaaaacatgtctcttgaagagggagacgttatgcaagttaagaatatcagcttggtaaaagggacttacatcaagctgcagcctcacactcaagatttcttggatatttccaacccaaaagccatgtttgtagttttgaaactgaatagttttcgttctattgaatatggttttgaagaatgtgtttcttatcattcctcttttgcagcttggagactacgcttaggagttactcttgcttaaccacgggtgatacaattatggttccgtataacaacaagcaatattacatcaatgtggttgaggcaaaaccttcttcagctgtgagtattatcgaaacggattgtgaggttgattttgctcctcctcttgattacaaagaacctgagaagccacagaagttgactccttcaaacaaacgacctctccaaggtttgctcatttggaaactctctattgatattcgataccgttctttctagaagtattagcctcaagttgtacctctattttcctttttgttcattgtagttaaagaagaagaagaacctgcaagcaaagttcccaaattcacgccgttcactggatcaggaaaacgtttagatggaaaagcacaaacacaaactgaaccagaagatacaaaacagcaagaaaagccgactgagaatgggaaagacgatgagaagttgtcagtcactacaccaaggcaaatatcaggaaagctcgtctttggttcaaacagcaaatcagctgcaaaagaaacagcgaaagtattgtctctcttctctggattattccatttatgtgattcactttaataaacccattgaagatatcttatcctgtttgtatggcttcttaatgtatataggttgatgatccaaagaacattgtgcaagagagctcaacaaaatccgatgaagctaagttcaaagtgttcacagggaagaaatactcactcaatggttaaaaacggttctgctgaagatatttatctttttaagcatttatacattctctcgtcaatatattggatggaacctaagcgacaatgaccctaaggataacacagatgtgtctgaaagcttgattctttaacttagatgtgtcgaactataggttattgatatgatcctatcttaatatgttttggagacaaagtgaacaaaaatcagaaatttcaatcagggaatatacttttgtcgattgattatacacagctttctcattcatccacgagtacagagggcttaagatgtttagacacatgatgccatcattcttacatgatggtatttggtaaatattggaagatgtaacaatatcatcatcatattcaatcctttattacaaaacgcaaactataagaatgagactgaaaagcaaataaaaatcttattagaagcaataatttagaaaacaaaaaatgttcattgctaacaaattccgtcgtcactaaaaacattgaagaacaagagaatgctttttttgaattgtgttattgcatacttgatcaaatttacagttgtaacagtgacgtttctcttacgtcggaacaacctggggttcaaacggcgggggagctccatcatccaccacaggctccactgtaggggtggcggctgagtccttctcagtctcttcaaacccagacttgaaccggtcataattagtgacctcagctgacttaaacggacgttcacctaaaatttttaagagatcatcctgatgcaacacctctttctctagtaaaagctcggcgatctcagccactttcactttgtgttcctcaaccagctctacggtccgctcataagctttggccacccagtccctaacttcttcgtctatgatagcaccggttttgttgctgtatggtttagagaagtcgtagccatcatcccttggtggaaacgagagtagcccaaccttgtcactgaaaccatacacagctacttgcgcgtaagtcatcttcgtcaccttctctagatcgttctgcgcacccgttgagattttacctatcaatacctacgttgagataggaccagaaacttaaaacatcttgaacaacaacattcttatattttctgtcgaggataattcacattagtagcaattagggattttacctgctcagctgcacggcctccgagagtcatgcaagtcatgtcaaagagttgctctttggtcatgagaaggttttcgtttggaacgtattgtgcaaatccgagagccgctgtgccacgtggtacaatagtcactttcagtaacggctctgcatgttcaaggaaccaccctacaactgcgtgaccagattcatgatatgcaactgtacgtcgctccaacttgcttatcacctgctcataagtaatcaattcagataaaaccatttttcaaagacaaaatagcaaaaaaacattatcgaaaaggagaaagcattttacccggtttttcttctcaagaccaccaataacacgatcaatcgcagattcaaagtgtgccatagtaaccgttgctccttcgtgtctagcagcaataagagctgcttcgttacagacattcgcaatgtcagctcctgcaaacccgggagtgagagcagcaagcctttgagagtaatatgatggctcatgatcaagtttgatcttcttcaagtaaatcttgaaaatctgatcacgccctttgatatcaggtttatcaatagttatctggcgatcaaaacgtccaggccttaacaaagctttatccaaaatatccggtctgttggttccagcaagaaccacaacaccagcggttgtaccaaaaccatccatttcaactagcaactgattcagagtgctttcacgctcatcatttccgcctaaacctccacgacctcttgcccgaccaatagcatcaatctcatcgataaatataatgctcggtgcagcttgtctcgcctcttggaacaaatgtctcaccctcgaaggcccaacaccaacaaacatctccatgaaatctgagccagaaatagacagaaatggcacaccagattctcctgctgtggcttttgctaaaagggtctttccggttccaggcggaccgactaaaagtgcacctttcggaattttagcacccaaatcttcatacttctttgggttcttaaggaaatgtacaaactccataatttcttgtttagcctcgtcacatccagcaacatccttgaaataaatctggcgaagaaaacaacaaaagtaagtttataaattccaaacggatcattaaaaacaaaggcaaaactctaagtctctaaccttattcttggaatgtttatcagctctcgttattgtagctttgcctatattgaaaattccacgaccattcttaccgccagttcctcctacacccaatccaccttgcatccgtctcgcaccatagatcagagtacccaagagcaacaaagtcggtgcaaacctcatgaactcttgataccagaccatttcagagacgtatgtgacaggaacatattcatgacgatcaacacctaacgcttcttgagcttcttcgagtttctcctcaaaagaatcaacactaccgatattgaagtagtacttatactgaccaccagttcttttagcaggaataccgttaccattaccatggacaacgtcagttgtttgttggtctttcggtgtgctcctcacgtagacttttgctactgatttgtttgaaacatctatgtggtcaactaaaccaggctcgagtagcttgtttttgaactcctggaaacttatctgaaacaataaaaggtagcataggatattagtggaaactatacgagcagaaccacatctgcagttccatatccaagaatatcacaaagcttagtttaaatatgcttgcctgttgttgttccccagagccaaacgagaaagtagaaaagaatacagcaagagctagtagaggaattagcaaattttggaatcggttcatgaacatatctcccacattctcattttcattcttttctgaaccctctgtattgcaacaataacatatacaattattagaatccttcagtagcaccaacaggtctcataataagaaaagtatcttcaaaatctatgttgttcacctttatgctctgatttctgatcactcttgggttcttgcttatctttaggaaaatagttctcataatctacacaaagacaacaacaagaacactaatttataaccaattctcaacactcattaaaaatggtttaacatttttgcaaacatactcttcttcttaggagcttcatcagagaagaatctacgaagtcttggattagcaaaaacaccaatcaaatcattattgactaaacccttccgtgaagctaaagaagcaaagtgtcttcttataaaccctaatccaccttccacttcattcacagacgccgcctcaagtcccggcgaagtaagtagccttgccgccgatctaacaccaccaccgtacaaaaatccctaatttcacatataaacaaaaatcaggtaagcaaaaaaaaaaaacaaattgagaacgaatctgagaaggaatcaatgaaatgaaaataacaactaacctttgaacgagaaatggagcgattaagcttagagaagaagatcattgtcatacaaaatcacaaagaacaaaactaagttcgcataatagtttataaaaatggtgaaatcgaagatctgaaacgagcttagaagaggaaaaaatgcaaacttttttattgtgtttgtggaataaaatcaaacagaagaaatgaaaaatccaaacaagataagaagaaattagggtttttgattgggggaaataaaagtttgggttttttaatatctgaagtttatcgagagaagagaaggtttatgaaatgtcaaagacaaaaagactctgtacttgttgtgttctgtagattctcttgaaccggttttgttctaaataatgtccgaatccaacttgtgcttaccggtcttattaaaccagtgtttggttcataggcctaattttacatatattgggccttggagaacatatgggcatagcttttgtcataaattgaaaataaaagtgaagaggtagccgtagcatatcagtttattttattttcagtaatgaaccaatattaactaaaaaggacactaaccatcatcaacgaaattatctgcattgttgttaatgaaagaattatggttctatctttttttttttttttttggctaaagaagaattatggctctttaaatcataattgagaaacaaataaataatcactaattttatcatatatatatatatatatatgataaaattatagacatatatacataacttgttcctcataaacaatgtataggaactgatatcaagcaaaaactcaatttggaaatcatggcaccttataccatcgtattgtatatttttttgggtatgaactatgtctattgatcgacatataagatgtagtgtatgtttttgaaagactcctctcatttacgccgattattactgacactaatttagtgtatgttaaaacttatacatttcgggtacttcacgtatctaatccaaaaggaatatcgatcgtgttaatccccaatctcccctcttttctttgtacacgttctagtcgcctcacatcaaataataataataaacaacaaagattgagagagacactttcaagaacaaatcatgtgaaaaactttggggtagggcttaattaaagagagacaagaggggacaaattggataagaaagggttggagcatgttttgtccaccaaacctttggaatggttaagagactcttaagtggaccaatgcaaaatcattttactctgaaacgaatctctgattctctgactttagacagagacaaatcggggacaatgaattagattcatttcaatcttcttcgtttttatggaagtcgagagtcccacgtaagctagttataaagtgtgttagatctcatgcacgtacccgactgtggacacgtggcgactcgttttatcacgagactaaaaatatgttttgtctcctttccacggctcaacgatttatgtacttccgtgtttgttacatacaacaatattgataatggtggtctaatcgaattattagtttatttacaactctgtataacttactaatactaccaactaaaaacttacaagtaaataattataatacgtttttgcttccgtacaaacaattacgtctacctcagctcattatatgtctgaacggaatctcaaacaaatatccggaattattgcattgtagaaaatgatgccggagaaaatgtaaaaggataaatcgaacatttaggatccaagaggttaaaagagaatatcaaattccaaatttggcgtttgcttcggatccaaacacaaacgcaaatatttcaacgcaactgtcacaacatgatagcaataacagctagttggaaatgtagagttcaaagatatttcaataagtccaaagcaataaaaatgagattgattaaattgcagctttacattaagataaaaaaaaattacaaaagaaaaaggggccaaattggaggccaattttaaagtttaagaagaaaaaaatctctactaagagaaattaaagatgacttattggactagtaaaaaaaatcccaaatatgccttaggcttaaatcggggttactcttattggtaaacccttcttgggtacagggaaaggaccatactgtataccttcttcatctccaatcacttcccatctgcaaattaaaatccaaacttcatcaatattatcataataataataatagtaagattgaaatatgcaaacaaattgatatcaaacgagattcacatcttttgtgttggaccatatatagactagtactaatttgacaggtcgccgattcatatgtttgggtactacaaattattgttgtaaataaatatctactcgtaaggatttaatgaatggaaacaatatccaagattgattcttataatagatctcatttacagctggcaatctctttccaagtctttactatcacaagttttttttttctttcttcatgggttcatatggacccttcatcatcacaagttcaactaaacatcttcaataaaacacgtagttaatatgtcaaaatagaagtttttaatgcgtatatgacatcattaagtgatgacgtcttagaatagttttgaagcatcatatcacaaacttcttggttttgaagctgtttttcctaattatatcaactataacccaaatcaaaacatcattaaagacttggggagaattggctcagggttaattctatcaatcagaagagacttatgcatggagtaaataaaaatagttgctatagaattgtgttaattaaaattaaaataaggttagacattgaagccaaattaaaaaaacaaatccaggtttttttaatagaaaacaattaaaatacctgaaggaagtagtgaggtggtgaaggaggataagcatctcaagtttagccagctcacttcctggacatgagtgcactccatttccgaatggcatgtacgtgtaaggttttggtgccacctgtcgacattacaagatgtcatctacatgcagtgtaagtccatcaaagtccccacatagttgacttaaacctagatttggatttgagttccatcaatgttttacttttataatattcatgtattctcctatctttcaccaacattaacttgtagtaggtcaaccatacccatatacattatctacccatatacataatctaagcatcgataaatttgattatatgtttagatatacctcgaatctagaaggatcgaatttttcaggatcggggaagaattcggaggagtgatggattcgccggaaaagaggaagaaccttccaaccctttgggatcaagtagccatcatattcgacgtcttgtactgcttctctaaatgtaaaggacagtacacttgctgctcttagtgtctcttgtatcacctaccaaattaaagtacgtatagtaaccattaattgattgtacgatcaagaatatgacatcatcattacaaatttgttttatcaatatattgaaatggtgtataccctagtggtcagtggcatttttcttgtatcttcccatgagattcttcggttttctttttttattttctgtcgaatgctgaattgctccctctagtaaaatagaaaaagaaaaattaacataagaaaaatgaaatggcttcttggctagaaccccaaaaagtttcattaatattgggggaatatgcagtaacaaaaccatagataaataatacatgatttgcatttgattgaaataagtaatgtaatcatatataaaatcgagtttcataaaatatgtactgtgaattctgtaatggaccaagagataacaattttctcacaccctttggcctttgcttcgataaaatatttactatataagatttaacatatttctttctaaatgatcctcgcattatacgcacatcatgtgcggcacatgcatgcagaagataaacttgaaaaaaaaaacatagagaaagttgcttacggagacttcttggaggagattggggtggtcgtgtaagtacttgagaagccaagttaagacagaagcggtggtgtcggtggcggcgaatataacaccgatgatgttgtcagcaatctgtgaatcacttaagccgttgcgtttttgatcctttgctcccagaagtactcccaatagtcctccttcttctctcccattctctcttctcttctctattactttccttagttcctcgcttaattctattcttgccttaatttcccaattacgaaaaaaaaaacatatttatttaataaccctactatacaccgttcaattatgacaaaaaaacaaaaaaaactaaactcaataacatgaatggaactattttcatcacatcaaacatctatgcttgaaaatgattttgtctttacgttttttgtgaaaagaatctaacgtatgtcaaataatatcgcacacatgtggtccctaaaaaatcaaactgtacaattttttgtttttccaatattctatgtggtattttacaattctacatggacttgtcacgttctacgtacaaattcctttagagatttcatctccaagtatatcaatcatgagtttcatatataatacgttataaatatatagttcataaactatataatataccttcatggacttatgaaaaagtgtgcccggtaggtcgagaggcatggagttgtaacccctttcgagacgttgatagagaagcttaataacatcaatcgtagtgggctcctctttgtccccgaacgctgacatgatcgccacatcgaatgcatactacacccacaaatccaattccctctcaaatcaattatttcataaaaaaatgatactacaaaaaaaaagaaaaaaaaagaaccatagcggaatcttgaaaaacaacttctttcggttcataaaattgtatgtgtttttaaaaaaaaattgtacacttatgaaatcttttgtgataccatttttttccgaacaattatagttactagttagaaaatgatttttttaaaaaaaaaatattgataatgtaaaaaacacaagtttcaagattttgttttcatattttctttgaaagaagtgaggcccgcaaaatttggagttttttggtcaatatttcttttggcatgcctcaaggagcatccatgcatataacccaaaatagatcaaagagacatactcgtttcatgtattcgagggtgttgatggacttttgggacgtccaagaggaaagggtttggaggacaaggagctcgatgtgagagacggttggtctgagagcagaaggcatgaaagaagactggaccagccgcttaagggtagaatggtatggaccttggtggaagaaaagagcctctggtccaatcatacgctctttgcttggaggataagttggcttgaacaagtgagctttgctcactaacaccattcgagccgcctctggactacttatcatcacacatggacatcctaatatgtgcgtcttgaatatatccccgtacctgcggatcggatatttcacacttaagactatttttcggaatttgtgtaaaagcaaattttgatcgtgtaaaacatttaaaaagtgattgttatgattaaaatcatagtgtaaggactaactttagttggattgataatgtgaaccgtttaactactagactaccatgaattggttatatttttttcaaaaatacgttttttgtaacaacaaaagtattgctttgcggtccatagttcgctcgaatatataagtttaatttttaccatccaatatattggttaaaaaaatacaatgaacaataaaccttaagtgaatatatcaataattcatgcatattttatgtatgtaacaacataggagaagaaaatagtacttgttttggcgagtggcgaagaaggaattgggattttctgtgtagaggcggagtgtctctccgatgtaaggcaaccccatggagccaggaggtagccgtagtctttgctctttccagtgcaaccaccatttaaatagtaacactactactactacaacaattgttaatgtgattagtgccggttcatcagcataaagagaagagaagaaatttgaagacgatgaagatgagatttgcattattccgagtgatttaagtgaattattgttatatgtatgaatgtatagttatagttatgagttgtgtgtgtttgtttgttcttgttagtgacttttgcttgaagtattgaggggtttatatagctatagttgagatggaaagatacttcattcctggcctttctttctttcttttttttttcttttttgttcaaacatttattatttattgtaattaattatatacatattaattagaattttgccgccaacgaatagctaatatatgcaaaaagaaaaaataaagatcgtatatctatcttagttttttgtatttatttttatagtaattaaaataaaatatatttttgataagtaatacaaaaatttgccgacggttctttggtccaataaacacaaacttgaaaattgcatatatactacaaatagaatatcctagattctagaagtatattaaaagtataattcagaacttatcattctacttgttttttttttttttttgaatgttatttacatgttctcctttcaaaacttgattttacttttcttttgagtctttacatatatagatatttgtacacaaagtgttcggcgcagtactatttatgtggttatcgtttgctatcctttgttgttctacgattaattattttaggataatttatattttttgttgatacgaaaacctgtacggaacaagaaaggaaaaataatgtgtaaattcagtggtgagtggtgtttgtgtatttggactgtattttacttgccctttggctaaccccacactacactttagtgaccacaaaaaacaaagaccttagttcatcattttttctttgagataaatgggatccactgaaaatgttgtatggttgagttctcttgtcagcaagaaaaaatctagcaaagttaaattcttttcttttgtttagaaaatattaccacttccattagttaaacaaatactacgtttgagtttttccatttttgttttatgatgatgaatcttttctctgtacgatgtgatagtcaattacttttacgtattttgtgtatacacaatgacgatagaagataatacaaaaaatctttgcaatagaaaacaattgataacatgatgattaagaaaacgattaaataattaatagtttctataacgaatggattaaaaagaatatttgacgatcttttacctttataaaatgcaaggttttaaataaaatttactctggtcaccaaaaaccttattttctaaactatttttgaaaacttcatcatatcttggaccttggtaaattaaatactttaaactaacgttatctttagtcaatgaatcacttaaaattgacgtatatggtcgttcgttgtggtgaaagggctgcgtagtggataagttggagaaggatctttaaaatataaatcaaatgacatttgaagattaaaataaaaataacttagtccgtgacatccctagaaatccacgtacgcatatacgaacctcagatcactgcaaaatgcagtagccgcttcgctggaactcctcagttattcacacttcaacgtttcctcttccttaagaaacttcccttcgttttttaaaagtcttaatattattcgtataatcatctattcatctttggtcggtgatcgcataatgatgaaattttcttaagttatcgtcgtcagtcttttttctttttctgtttctttttgggtttgatattaagtcttatgtatattgttataagaatataaatgttcttacttttatttgtagacatctctgttctgatgttacttgcttcacaaactttaattaatagaagtgcgtttgatgtatcttctttcaaatattgagtaggcaagcactgaaagatgaattctatataaatctataataacaatttaataaataaaatcgtattaattttcatggaagaatctataatttttttttggtaaataatcatctataacttcttaatgtagttttgtaaaacatctatctctattgttcaactcgacattcaatatcagattctccatcttcatgatgtattatcggttgcgtagtgaagcgttcttcgctcgggctaaatgacactcttcttagctcaaactctctgttttgtgatgggctttgtggccatggtgtgatttgcacagttgaagggctcggagtcttgtgagtcataggtgaacttatattatgaatggcactgttcttgaaagtatgcgaattcatgtctttctcatcgaagattttgaacaagaactttagctttctccacaaggaatcctcggaatcatcacctagagtgtgcctatgttcgtacaagaaaagagccacgaagacgagtaatgaaaaagatatagcagtgcctgctattagaaatagacccaagaagctactgaggttgagacggttggacgaaagagcggtcattggatcaggacaatcattctttttcgggaaccatctgtcctcgatttgttgcgttacattgttttgtgtcagattcaagatagcccttgagaattctcccgtcaaaggtgaattcttcgggaatgcctacacattgatcatggaaacaaaacatgtgttatttgtccccttattttgtaaaaatacatagaaaggaaacagaaggtacttacaaagccaaaaccaccagtcttaaatgtaggttcaaccatgacatatttagagcaggattgagaaaggatagccttaaggtaagcaacttcgtcgaaagctgctgcgataccttttgatttccccttggacaaaaggtcgtcggcatctttggcagaatcaaaaggctttagctgatcttcatgaaatcctagccctaatagaatatctttaacgaaagcaccaccttggtaccctacacaatccctatttttgatgagatcgtttacatttgtgaccgtcggttgcaaactttgtaccgtgaggaaagaggtgagactcgctgtgtagctctgagtgagaacaagcactacaaaacaccagacaaccaccacaaaccttgctaaattgctcactacattctcacctatatacacatgcacaagttttcactttatcattacaatcataaaataagttgagatatctaaaaaatattgacaatgtaattatgtttggagataaaagctacaaaacgtaaatatttatcattattagattcttgattggtgtaagaacttacggtgggcaaaaaccatggtggagaaggagaaccataaactagtgccgatctggtactgaggcggtccacggaagtcggtgttgactctgtgttcgaatagccacacaacaaaaccaatgaagacgaagaaacaaccggtggtgacccatagctctaagctccaaggttcgaggaacacccatgtgtccttattctcattatctctcaccggcaccatcatagacactcctgactctgtgaacggtaacgtgaagtcagcgtacaaagatctgttcgctgtgatggttatatctccaacaactgcatcccatgtctgcttcatatattagtataatgtgttataaatctaacatctaaaagacataaaattagggaaatggtttacaatatgattttgtgaatgtttagaattttttgtttgtaagtagaaaaaaagaaactaaccttgtcatatacttggtagaccaaattgttgtagttatttggagactcaaaactgacgtactcaggaatgactaaatatggcaattccttaagagcagcttcaaagatttctatggcataaccggttggggtctttttgttagtgatcggatttatggttaccttaacaaaatcaaagaagcctttcttcattggaacgcccactctaagcttcttccctggaatctcccatccttttggaacaatttttgacttccctggccatatcactggccccaacgtttttttgtttgaacttgttgcatccatgagtccatctcttggtgtccaaaatccaataatcctctcttcatttccgacaaaatttatgatctcaaactttggtgactggagctgcccgtctatgagtttaaactctcctgccaaaccattgaatcttacctccgagaaagccttttgaagacttggaccatagagagagacccctacgttccccaaatctgtcctattttttgacaaggtgctcccattatcataccataagctctttgtgttggctttctccacagccttagccaatgcagtaattgaatcatatgcccataatgcaaaaacgtttagatcatctctcatcgatggattctccttctcaaatgttcttttccatctcaaacggaaatctccgagctctttcgatttggggacatggctcctcacacctaacacgccctctatagtatttaagctacgaccattgtttatatgtctcatcatatgcgtcattccattggtcattaaccatacatacccttcctccatcatcccgatatccctagctatctgaaaaacccgtaaagcgagacttgattccatgtggacaacaaatactctcgcttgcctctccatgagcttacgaagttctttctgaatctcatcatcgatagcctccggagggatcacacttctcttgacttccacgtcttgtaaagcgtcaaacaagaaaggcatgaatccttcaccaaactcgttgtccacataaattgcgacgacccttctccacctaaagaatttgaaaatggacgcaatggccctgacctgggatgagtcgtcgatagtggctctgacgaagtaagggcttttgatggatgtcaaaagagggcttgttgcagagaatgtgatggtcggtacttgagttttgttggccagtttgatcataaaatctgcttgcatagagtttattggtccgatgatggcgctcacttgctcggttttgattaggtccaaggctgcttgcaccacaagcaacataaagaaaagaagaaaggttaaatatcctctgtttttggatataatatcttccattttcaatggaagagttacaacttataaggctaagccatgtttgtcgagtccaaaagagctctagttgcaaagtaataagacaatattaatttacataaatagttaaaattgtagaggtatcataagacatgtcaccaatagttttcgactattcatctaatatattaagactcatgagttaaatataattaacgagactaatagtaatcaggatttctgcgaccatacaaccgtcaccatgaatttctagaagagaaaaaaattggacttctctatcaagagattgctcttaccatagacattagaccacataagaatacacttggtttttgaagtatagtctaaaagataaatcgtcaccaagactcttagcatatacccccatatgatactttgatttttaatactgatctaaaatattggtcacattcaataaaatagtaattagctaaaccatgtctatacgtaatatgtttcattcaaccgcaactaataagtaataaatcaaaatgacgggaagctgaagcaagacatagagaagtaacgaacctgcagctgaagcctgaacagtatcttccatggaatctctaacgtgaagcgtaagtcttgtgaggtaatttggatgatccgcgtagaaatcggacacggccatctttatagaagtgaggcagatcttggaaaatgttgtattgagatcaagaactactcctactttgatttcacttgtttggttttgtcctaaaccaacccccatcaacaaaaaaccgcaaacaaagtaactcaaaaaggtgttattagttttcatcatcataatcgccccaaaactgaggagactttatgtgattctttaacttacttttttcctgttatatatatacagtggaaggatcggtttgaaagatacttataatcaatgaaagactttgaaatactatgccaaaaattggtttctcaacgaaagagacatatcgatttttttttaaaaaaaagtgtgttgactagaaattaataaaactggtttgaaagagtcaaatgaggcttttgcagatgaattctctttgaaaagcaaactacaaaatacccataacttattaaataaccaaatcgtctattttataaaatataaggatcgcaattctttcttttttttacttttagtattgtaattgacatattataatatcataattgaaataattaagagttaattgtgcaaaataagattcttaaccctttttgagatctatttttgaggatagcctttctgaagaaaaaaactaatgttttatacatccatcccatgctaatgcacgagataaatactattgtaagcttttcttatataaaaagaatatatacattttatccagatttaatggtaaatttaaatattataattttttaataattgttttggccaactttaagaattttcaaatgtgttttgcaataggaattacaataatcgaaataggttagaggtaatatttggaaatatatgtgttttaaagagaataagaataagcaaaaatgtgtttgggaaatgtaataggattaaattaaaaaaaatggttgagaataattatatgcttgcacacaaaaacactaaaaatagcttatatatgtagatatgtccatacaattaacgcaaaaaaatgcaatgaaccgtttttaaagaattcttagaaataaaatgtatcaaaaattgtcgtactactataaaataaataaatgttttatagaagagtgtatcttgtagatatgtgtactttggtggaattagcatacagaaattaaaaaatatagggtaagtgaagtgagtttccctccaagatttttaattttattttttacgagcagtcggaaattaacggaattttcttagtttggatttattcagatttagtttgttcaactatgccatacacaatatgattgtccgttgtagaacaacattctcttacgcatgttcgagaataggtcaagaagacgtataatatgggcaaatcgaaaacaaatattcgtcaacattattttttccaaaacaatgaaaatacattaatcctaaattacagtacatgattttggatataactgaagaatctacatttacgtgggtgatgacgacataaacaattttttatggttgatatacaatagtctaatttcttaaaattctgttgtgttgaagaattgattaaattgaaatgcatttggtccgatttaagtcattaaagggtaactggaggacgttgagttgtttagcttgggttataaagctaaaaaagtctccaattcgaagagagggtttcgctaaaggacaaccacttcgtgaaaggcagtgattgcttttacataactatgtgtacctttatctttcttcctctgttacgcttcttcttgcttgagattgtgatattgtagagctatgagcatttgcaaataatgatatagtaaattattggatcttttggccgagatgtaagaatcacgcatggtggatggatcatgaatgaccagagccctctttcacgaccctggttgggaatggatgcgaatagttatcctcgtttatttggaactaggaactttccttaaagtcacttgccactatgtacatatgaagtttttagagttgctatatttttgcaatgcaatcctattaatataaactttgttataaataaaagaataatagctttgttaggaatatatgcagcgaacttagcttatcctatctataacttgttatggaatcttctaaacttatctctattgttcaacaacacattcaatatcagattcttcatcttcaaaatgtatagtttgcgtagttaaccgttcttcattcggggtaaatgacactcttcttagttcaaacgccctgtcttgtgatgggctatgtggccgtggtgcgatttgcaaagttgaagggctcggaatgtactgagtcataggtgaactcacatgatgaacagcgctgctcttgaaagtatgcgactttatgtctttctcatcgaagtttctgaataaagacgttagcttacgccatatcgaatcttcggaatcatcacatagtgtatgcctattttcgtacaagaaaagaaacacgaagatgagtagtgccaagaatgaagcaatgcctgctattagaaacagaccccaaaagctacgaaggcttagacggttcgacgaaagagcggtctttggatcaggacaatcattttgtttcatgaaccatttgttctcgatgtgttgcatttcatctccttgagtcacatttaagatagcctttgagacatctcctgtcaaaggtgaattcctggggaatgcctacacattgatcaaggaaacaagcaatgaatactcgaactgtctttttttttttttcctagtttgaaattttcatatataagggaaaaaaaaaagaaacttacaaagccaaaaccagcagtcttaaatgtaggctcaacaatggcatatttggagcagtattgagaaaggatagccctaaggtaagcaacttcgtcgaaagctgctgatatactaccattggacaaaagcgcgtgacattcttcggaagacccaaaaggcttgagcttagaaacattaaatccctcttttattagaaaatctttaacaaaagccccgtgttgatagcctacatagtccccattttttatgagatctttcacatttatggccgctggttgaaaacgttgcaccgtcaagaaagaggtgagatttgctgtgtagctctgagtgagcacaagcaccacaaagcaccatacaaccaccacaaaccttgctaagttgctcactaccttctcacctatatgcacacacacaaattacttcatcattaggatcttgattcttgttaataaaaaaattatcacattgaaaataagttgacatttaatatataaacaatgtaacaatagtctcattttacataatatagttttcaaaagaaagttaacatttatcattattggtgtaagaacttacggtgggcaaaaaccatggtggagaaagagaaccaaaaactagtgccgatctggtggtgaggcggtccacggaagtcggtgttgactctatgttcgaacaaccacacaacaaaaccaatgaggacgaagaaacaagcagtggtgacccataagtctaagccccaaggtttgaggaacacccatgtgttcttattctcgttgtctctcaccggcaccatcatagacactcctgactctgtgtatggtaaggtaaagtcagcatacaaagatctgtacgctgtgatggttacatctccaacaactgcatccaaagtctgtttcatttttaataatttgttagagatctaatatattataaaaagacataatctattatatctaagactagttcagtctactcattgctaactgcttttacatagaattgcttgcacttttagattttatttaagaaaaacaagaaactaaccccgttatcgactttatagaccaagtcatcgtagtcatcatccggagactcgaaacggtagtattgtggaatgactgaatatggtaacttcttaagagcagcttcaaagatgtctatggcgtaaccctttggagttgttatgttagtgataggatccgtgattacctccacaaagttgaagaagcctttctttactggaacacccactttaatcttcttaccattagttggaatctcccatcctttaggaacaatagtagacttccctggccatatcaatggcccaaacctctcccctgtaaatgacgttgttttgtttgaatttacattcacaagtccattgctcggtgtccaaaatccgacaattctctcttcatttccgacaaaatttatgatctcaaactttggtgactcgagctgcctgtctatgagattaaaccttcctgccagaccattgaatcttatttccgagagagcctctagaagacttggaccatagcgagagacgtgtagcgtccccaaatctgtcatgttatttgacgagccactcgcattattatacggaaagctgcttatgttggttttctccacggccatggccaatgcagtggttgaatcatacgcccataatccaaaaatgctaagatcatccctcagccatggattctccttcttgaaatttcttttccatctcaaacggaaatcttcgagccctttcgatttggggacatggctcctcacacctaacacgccatctatagtatttaagctacgaccatgatggatatgtctcatcatatgagtcattccattggtcattaaccatacatacccttcctccatcatcccaatctctgtagctttctcaaaaatccgtgaagcaagacgtgatgccatgtggacaacgaaaaccctagtctgcctcgtcatgagcttataaagttcttttagaatctggtcatcgttagcctccgaggggatcacacttctatcaacttgcacgtcttgtaaagcgtcaaacaagtaaggcatgattccttcacctaactcgttgtccacataaatggcgacgacacttctccatccaaaggattcaaatatggctgcaatggctttgacctggtatgagtcatcgatagtgcctcggacgaagtaatcgcttttgatggatgttaaaagagggcttgttgctgagaatgagatggtcggtacttgagttttgttggccagtttgatcataaactttgcctgcatagagtctattggtccgatgatggcactcacttgctcgttctggattaggtccaaggctgcttgcaccacaagcaaaccaaagaaaaaaaacatgttagtatttcactaaatgtaacagcagtagtttaatatttgatgataattaatgagacaataataatttgcacaagaattcaaatcttcattgtataggtatcacatgacatgttaccaatagtcattgactagttattattctaatatactataataactcatgaattaaatattttaaagaggctactaggaatagtagtaagactttctagaaaataaagaaaatgaagagattgctcttaccaaagacgatcctacgtaatatatttcatccgactgcaactaataattaataaatccaaatgatcccttacaagtagcggagaagcaaaagacataaaagtaacaaacctgcagctgaagcctgcacagtgtctttcatggaatctctaacgtgaagcgcaagtcttgtgcggtaattaggatggtctttatagaaatcagacaacgccaggttaatagaagtgagacagatcttcgaaaatgttgtattgagatcaagaactactcctactttgatttcacttatttggttttgtcctaaaccaacctcgagcaacaaaaacaaacaaacaaagtagctcagaaaggtgttattgttttttttagggttcatcattatccaaagataaggagacagacaagttatgtggttctctaaaacttccctttttctgttataaatacagaggaaataaataggtttgaaaaggtcttggaagactttacaatgctataacaaaattggtactcatcaagaaaagagtgataaaataataaagattagtgttgactagaaaaaaataaaaaatggtttgatttagtcatgagacattgccgaagatgtttctcggcaaagcaaggctacaaaatttctattatacgagttatataactaccttaatcattgaggtacatggttcgtgatgattcaagttaaaatttgtacttcagttggaaagattgcctaacaattccgttatgaaggctaactctgtcttgaaacttcacaatgtgtttttctttcttttaagtgcaagagtaatttaaaaaaatatattattttatcatattattagtgcaaggatatttgtattaaaacaaatttcgtttgttcaacgcgtttttgggtatgccatatttcacatcaaacacaatgtattggctgttggaggaccacattttcttacacgtctcggagacatgaagacgtataatgtgggcagatccaaaacaaatgttagttttgtcaacatttggtttttccaaaacaatgagatcgagaaagacatccatgtcaaaagattaatagttttttgtgttattttgcagattataaaattttgcgttattttcataatctccctaatttttatataactcaaaaaggaagaagattagaatccaaattcagaaatctaactatgacattgagtttgaaaacaaacataggaatacaagtgttgagaaaagaaagtactcctaaaagaaagcattaaccacactggctaacttgttatgcactttagcaacttctctctatcattcaccttcacattgaattatagcagattcctcatcttcaacttgttctgattgcgtagtgaaaagttcaccgctcgagatggaagacactcttcttagctctaattccctatactgttccggacttcgcggcaatggagtgctctgatcggtcaaagggcttgaacttccttgagtaataggtgaactcacattatgaacggcattctccttgaacatatgcgactttatgtctttctcatcaaagtttctaaccaaaaattttagctttccacggaaagaattttcggagtcatcaaagagcgtgtgcttgtgttcgtacaagaagttggccacgaagatgagaagtgccaagaatgaagctatgcctgctataagaaacagaccccagaagctactcaggctgagatggttggaggacagagaagtgtttagatctggacaattatttggtttcttaaaccatttattctcaatatgttgcatttcttcgccttgtgtcacattcaagatcgcccttgagacatcatccgtcaaaggtgattttttggggaatacctacacaacgatcatggaagaagaaaatcaaagcaatgaaaatacctatatcatcaatatacgtacttctttggctgtatctagtgtaagggtaaaagaacttacaaagccaaaaccagcagtcttaaaggatggttcaaccatagtatatttggaggaattctgagaaaggataactttaatgtaggccacttcgtcaaaagatgctgtgattgtcccattggaaaaaagctcgtcacattctacggcagaaccaaaaggtttgagctgtgattcatcaaatccttgacttttcaaaagttcacgcacgaaagtgccccgttggtacccaatatttttgttaaattttatgagatctttccaatttgtaaccgttggttgcaacagttttactgtgaagaaagatgtgagattcgctgtatagctctgaatcagcacaagcaccacgaagcaccacaccaacaccacaaacctcgctaaattactcaccaccttctcacctatacacgcaaacaagttgtaagtatatcattattatcttgtttcttattttggaacatcttattgataataatttgagatacaatatctactatataaaaaccgtatttagagttctttcatcatctgccaatttttgtaacataaagtcggaaatcttgccggttaaaagtttctatagtgaccaaggttgaactttaatgatgatcatagaagatgggactcgtttcctagcggtatcccacaaagaagaataaactaagactcgaacaaataccactaggctattccgacttagttcttgattgatgttacttacggtgggcaaagttcatagtggagaaagcgaaccaaaaactggtgcctatttggtggtgaggcggtccgcgaaagtcggtgttgactctatgttctaaaatccacacgataaacccaatgaatacgaaaaagcaagcagtggtgacccataggtctaagctccaaggtctgaggaacacccatgtgttcttgttgtccttgaggggtaccatcatagacactccagactctgtgtacggtagcgtgaaatcgacatacaatgacctgtttgctactatggttacatctcccacaactgcgtcataggcctgacccgaatgttaatgatatgttagaaatcacatataaagaaaaaagacatgatccacggtgaaagttaaagtaaaagtaaaagaaccatagtagaaatagacgaactaaccccggtgtatacttggtataccatttcatcatagttctcatctggagacaagaaagcaatatatttaggaatgacggagtaaggcaacttcttaagaacagcttcgaatatctcaatacagtaacccgttggggtcattgcgttactgatcggatctatctttgcatccacaaattctaagaagcctttcttcactggaatgcccactctaagcatctttccgtttgttggaatctgccaacctttcggaacatctttcgacttaccgggccatatcaccggccccaacctctcccctaaaaccgacgtagtgttttttgactttgcattaacaattccattgcttggtctccataatccaataattctctcttcacttccaataatattgatgacgtcaaacactgatgattctagctgcccgttaatgagctcaaactctccggctaaaccattgaatcttacattcgaaagagccttaagaagacttggaccgtagcgagagacccctaatgtccccaaatttgtcttattatttcctgaagcgatcggatgatcataccgcaagctctttatattggttttctccacggccattgctaaggcagtgatcgaatcatatgcccttaacgcaaaaatgttcatctcttcatcattccccttcttaggaaacattttttcccatctcaatctgaaatttttgagcttcttcgatttggggatatggctccttacacccaaaaccccttgcatattctccaagctgctaccgcgttcattagatttcaacaaattcatcactccatctgtcaataaccatacatatccttcctccatcataccaatctctctagctttctgaaaaaaacgaaaaccgagagttggtggcatgtggacaacgaataccctcgtctgcatcgtcattagcttataaagctccttgagaatttgatcatcattagcctcctgagggatcaaacatctattgactacaaaagcttgcacgtcttgtaaagcgtcagtcaataatggcaatattccttctccgaattcgttgtccacataaatggcaactacatttctccacccgaaggatttgacaatggccgcaatggctttgacctgggatgagtcatcgagagtggctcggacaaagtaagggctgttgatggatgtcagaagagggcatgttgcagagaatgtgatggtcggtacttgtgatttatcggcgagtcttatcatgaactcagcttgcatagaggttcttggcccgatgatggcgctcacttgctcgttcttgattaggtccaaggctgcttgcaccacaagcaaacaaatagaataagaaaattatagaggttaaatttatcactaaatagtaaattaaaatttatcagatttttgggaactaatgagtgaattaaaattatcatacaaataatgtttacgcatgagttaaaatgaaaatatcaaatgtgtcttactctatatttagcactttattatggtttattattttataaaaatattgcaaaatttaatttgaaaagatgctactttgtaacctattttccgtccaaaatcattaatcacactatcaacgtaatgttaaaagttaattgtattttactaccacatccatatgctacggaaagtcatatcttattttttctattttagttttaaacttttaataaacaataatatatcaaattatcgaattaaactattcaggaaatcaataattgattaatcttttagtgtgagaccctcatttcaccacccactgttagagtccgttcgccacttgacatataacccagtagcaccaaaatccttatccgtcatacataaatgtcaaacaaccaaacaaaaaaagtgacaagaattgcttcaaattagtagaaaacaaatttctaccaaaccatagatttgtagcaaatttggggaaaataataattaccatgttcatcattaattatttagtttgttttaaaataaatagttaggaattgattaccggcataaattcatagctactgaaacgttttattttgttaaattagatattgtagttgcttgtctgaacccaataaggttgataatagctatgcatatatggctactatatatggaaatagcctaaattttgaagccatggaaaagattggtcagactaaaagaaaatagtagcccttagatattaaatcatgtctggccaaacgctgtattatattcgtaattaagtagagcgtacatgtttcatccaacaatcaacataaactgataataaatccaaataaagatgcaagagacagagaaggaacgaacctgcagatgaggcctggacaacatcttccatggaatctctaatgtgaatcgcaagtctcgtggtgtaatcagaatgatatttgtagaaatcggacaacgatatgttaatggaagtgaggcagagcttggaaaatgaagtatggagatcaagcactactcctactttgatttcagttgtttggttttgtcctaaacaaccctccatcaacacaaaaccacaaacgaacaggacaaagtaatacataaaggtattattagtttttctagggttcatcactttcatccagattgaggaactttatgtcattctttaacttcctcttcttttttattgttctattgcatatatacacacacacacatacatatatatatatacatatatagagataaaataaaatatgaaaacaagaatgtaaaagaaaacaaacgaagttaaggtttgaaagtgacagaaaaaaattgtatggacgataatatgagctcgctttttgtcattattctctaccattgtcactccttttttttaggctacatacgtttactttgaaaaatctccaacttcagtcttcttacttgtttgacggaagattaatatttttcttccagctagcaagaccgtttcatacacataaaaggtcataatcgagtgattttacgctagtgaatatcctactaagagagagagagaaagaaaatgccaattgtaagttgatggatcatctcagaaaatgtaacacgaaccaaaaacctttttggaaaattactatattattttttttgtagtgaaaattttattattaacaaatgtctaaaatttgcttaataggttctgaccggatcgacgagataaaccgggttacaacccggttgcaatttggatcaaagctaaaaagagatggcttcggttgtgtcatggacgacgatggtgatcggagaggggctttggtggtgttggggccgaaggtggaggtcgaagaagcttctgtccgtttttaagagaggtttctagatgagtttcttttctgcgatagattgacatatgtatacgaaaatcagccataaatctctaccaatagctcacatacccatgaaacatcacctccattggaaatctatttcaatttcctataaccattataaagaggtccaaagctaaatctcaatgaaagaacttcatccgagtcgatctttgagagacttcagataggttatgaatcatcaattctcttctttgcatttaaatgtgtgtcctccattattttaacatgaaatatctcaaaagagacacaaaatacacacagtaactataggacttctaaaatgcaagaagactcacttggacactaaatgcaacaaaccacaatgaaaatactaatgaaacaccataaaatggatcttaataaccatgataaagtgctaaatatagagtatatcatgggttatatatagatttgagaagagactaacacacaaaaatatgaaaataagtcagtaaaattagctaagtaatcaaaatgcttcaacaacttttgaaattctatttatcatttagctatacattctaattggggagtgaaaaattctttgctttcaaaagatacacatcttggctcaaactgcatattttgcgacggacttcgtggtcatggtgtgatctgcactgttgaaggtcttggagtggtttgactaaaaggtgaactcacattatgaattgcactctccttgaacatgtgcgattttctgtcgttttcatcaaagtttctaagcaaaaatgttagctttctggaaaaggaaattttcgattcctcatttagcgtgtgcctatgttcgtacaagaagttggctatgaagacgagatgtgccatgactgaagcaaggcctgctattaaaaacagaccccagaagctattaaggttgagacggtgggacgacaatgttgtctgtatgaggacaattttgattctcaaaccaaatcttttcgagctgtttcatctcttcgctttgagtcacattcaagatttcccttgagacatcgcccgtcaaaaggagagtttttttagtgcctttttgtcaatccccctttaaaaaagttgcatctatttatatagattcgtgtcctttttctccatatatttttattttattttattttttattactttttgagtaagatgtgacttttacaatcacatttgtgtatgtaaacatttttgtcttcttaaatatatcctatattttctcttcttaaaactatagaattaatgatacgcatcattttgagtttgaaatttttaacaaaagtcttaagttatatcagaaagtatttagagtactactttttttttttagaatacttttccttgcaacattgcggaagtctcttataataaaatcatatacagccactatctaatcgtttatcgaaatttcacaaataaacatatggatgatgtgacaaaaaaaaaaagaaaacggtattagagagaaaatccacaaaaatactcttacatgtttcgttgaactcgattcttttcataaattccaaatcattggttccaaaacagaacttcaaaaggattacgtgaattatttattagggtacataaatgaagtgaaaatggtggggctttgcgttaaaaattaagacccaccagccgacctgaccatgtcctactcagcttacacatgtttccatgtgaccttaccacttcttctaatcccattttaccatatttttccttatataaaattactctctcgtacaaaaaagaagagaagttaacaattctttttttaaaacatcaaaggcttagattctaagctgtaatttaatttcttatacccaacatagtactagcttcaacatctgaacgcaccttcttatgcacacaatatctctctttttgatactcgtgttgcattgtttactaattgacacgtataataaaagtaaaaaaatcctttggctatacgcatataccagttttactacgtcaagtccatttcaacactttaacaacttaaaaagatttgcacaagaaactttgatgaacaaagtatgtttaatcacaaatttaagtacggatagtaaaatttgttagacactttatacttgggtatataccaaagaaaagttgtttgtgtaattttgttacatacttacattgagttacgatttaagaaacgtttgaaacttgcttttcttcttctcacgatttaagaaacgtttgaaacttgcttttcttcttctcaaaagtttggagaatattggaaaatttgctttgtaataacataaatctatcaattgtatgcaacggataacattatatatgagtttattttgcttagtggcgcacaacgtttgacccatccaaagaatttcccattggtcagagtctctgatctctcaactctcaagtctcagccagtaaatattatcaaaataattctaaagtaaattattttcagtgccccctttcttttttagtaatttaaggacaatctcacatgacctttttccagtggtataaacactcttattttaattatttgggccttttcacttttgcgatatgtctaatcaaaccaattatcctatacgtaaaaattaaaaattaaaatgagcttaaactaattatgaaagttacaacgttacattagttgattcgtattattataatacgctttcatgttactctcccataaacaaaaacaacttaatacacatgttaatggctcaattttattatttaacatcaacattgtttaatgctttgattaaaatataaaatttagtgatcattatgtggatccaagagggaatcttagatcgacgatgggtattgagctttgcctcattaagaaaacaaaatagacaacaactttacgttcaaagatggaaaaaaagtttacacacaaagaatgaatcaaattggttattttgcgtgtggcgccagctgatctcaaatcttaaattaattgatcacaaaaaaatttagcatatattttaaaattttctatttcttcgtggccttagaatatctaaaattactattttcacaagaccagtaaatatttgtttagtctactgagaaaaatattcattaatgttttttttttaatattcattaattttaatattcttataatcatggtcatgatctgtaataatagtggtcaaatcaaaggtgaagtttctgacaaaacatatttaaaataaattaatttagaaattagaagtatttgaccagtcaaataaaccattaagtgaccagtgtgtgcgttattaacgtacacatttgagcattgatattgtttctatatttggatttagggataacacatggcgaactcagcgttgtgagagatgctgtttttgtctttgtaaaccaataaaccatagtcatggtcctttactccttttacaaaaaaaaaaaaaagattcattgcttgtttaaaccgaactaatagtttttagatcaaatcccttaatttcttgtttaaaccgaactaatatggacggtttaaacaaacaatgaatcctttctcatgacttatatgaatatggataaattatgttcttactaacacataaatatataatgtacaatataaaatcgtgttactgcatatatgtaaggtgtcattttccacaaaacgatgtactgtgtatgtatatggttttttttttttttttttttttggttaaagtgtatgtggggtgttagttaatttaagcgaacgatttgttcgttcacacgagtttgaaaatccgtcaacatgatcaaataacaattatatttaggttttttagggtaaacaaaaagcagatttattatatgttgatgatagaaatacaaaacaagaaaatggggacaatgtaatgtgggttcttttttgcgtaaatccaggctggtttgaagacataagtgaaaaaaacatgtagaataattttagaccaaacctgtctactcttcctatcttttaaaatcattatcattcgcaatgcctatctttccatcatcctttgcccctcctctccaacccccacacacaataatacttatatatatatatttgaatacaaaattagtttccatagttgaaaataatggacttacaattattgtagacaacattggttctatactggtgattaatgggtatacagacttttttgatgttttcaatttttttgaaatgtgattttacttcttttggttttactattcacaaaaagtcaagtatttacgtttatattttatttttaaaaagtaaagtagttgtagatgatccatatattaaaaagtagagtgatttctttgagtaataaccgatacatttaatctcaaagtagtatataaggtcgatctataaaaatcaataatatgctaaagatttgtgatagtcatatttagttaaaatataaagtttgtttgttggtttcgacaattgtaaataagaattacaaaaaaaaaaaaacgattaagatttcatgatttaaaaacattgggccatagaatattttatgaaataaggaattcaacattgaatacaaaaataagtttccaatatttgaaaaactatggtcttatacaattattgtagacaacattggttctacactggtgataaatgggtatacagacttttcaagttttcaaaattaagaaatgtgattctacatcttttggttttactattcacaacaaatttcaagtatttacgtttaatattttttttaaggtaaagtagatataccttttaatgattatcaaacatgatgagcttgtttatctcaagtgtttccgttattttactatcattaattctttatctacagaacatctatctcgccatccatctttttacatttttaaaaaattaatattttcaagtttctatgtaaaattaatgtattatatcttaagttatacaaattttgattagataaatataaatttaattcataaaataaagttatatttggattttgctataattatttcttttaatatatgaaaatctcaaaacataaatttgaagaaataaaatgaagggagtaaccccaagtgacgtggtgtagtggtggtagttgaacttacgcgtcagagaaggagattgcacctttcttaccttaatgcttttgagctagatttctacaagaaacaaaatcattttagttggatcacttaaattcttaggttttgatccaaatgtttattttgcggcagactaaacttctgttaaaaattatgttgactattagattttgttttagaaaatcgacaataggatatgccatgctaaaaaaaaaagttaagggagtattaataggcggaagtggtatgcatccgcaatatcctgtctattgggtatcctaaatttgactcaattgaatgattaattcttattcatttcgcggaattttatctctactactagaccattaatttttaaaaattattatattcctccttcacattatttcttgtgattcatgtcccactatggcaataatatatagggatcactaataatatacacactatttcaaacatataatttatagtaataaacatatgcacacatatgaaggcaataccgataaattttctcgtgctccatgttgggatctctctcatgtgacgactttaaataaaagattatgattgttcataaatactatatatagagatgtatattatgtatatgtatataaacatacgacattggttcctccaacattaatggcaaatctcaagaagaggatttcgacaatgtgtagatcttgtggtagtaagaataagacctcgacttctataagatctagcgaattagaagttgtcacgttagttatggaataattcactttaaataactaatacaattccattaatcaaaacattaacgatatcgtcaacgctaagtaaaagcccacatccccaaaccttgtggattctgtctgtataccccctaaaaaactcattgccatttgccatatttaaacaggaaatggcttaagttttagttaagatttcagagaaatcttgtctaccccgcttaagtttgtatttcacaaatatctttatatgatattatcaataaaattagatggaaatataaaacaaacaggaagtggtaagatattcataatttttttcgtaaacacgtatttttactatttaaatagatttaaactagagaagatgcggacaaaaaaggtgtaagaaaatgttaccgtaaatagtgtaaaaagatgttaagtacacctccttttgagattaacttttctaggataaacaacctttgggaaaccattaattttgctttttggaaactactaatttgttcaacgtctttactctttatacatgttggaaaaaaacatagacgtggtttagttacaagctagtcaaactaattctacggatcttttgtcatagttgaaccaaataccatcaagtttatagactaaaatagtagcataactttagatagtttaaaacaagtggacactaaatagtttctaactcgacgccaaaaaaatagttcctaactggatggcaaaaagttcatacctcatgaagagctaattaaatattaaaatataataacagaattttcatttttcttccattgattttttttgccatgtgttatctcaattgattcatttacaagtattattaaagaagtaccatatataataagcaaagagacactctcactctctctactcctctctctctctctctgaatcactatctcttctgcgagttcaatcaccacaaactcacaatcaaatacaacagaaacacacttaagacccattcatctggatctgaacacattattgatggaggagaagtggaagctgtcgaagaaagacacaacagcttcttcttcctcctctaagtcaaagttttctagaagcttctcaacgagtgcttcctccacaaagtctccaatattcgtaaggagttcctctactaaatgctctgttccttcttcctcctcgtcctcttcttcttcctcttcaatctcaagaagcttctcaagaaaagagagaagatcttcttcttcatcatcttcttctatcactcagaaatatagcagcttggctaaagaacagaaggcaaggttttacatcatgagaaggtgtgtggctatgcttgtttgttggcacaaacatggagattcttaattagatcttcatcttcttctgcccctttttttttgtttccttgtaattagatcagtttgattattaagggtttccatacaagtacattgtaagaagagtttttgtttaaaaaattagggtttctatgctcatttttttcaattaaatgacttgcatatgctacatatatacacaatcatagacatgtgtgtgtatgtatcattgatgcaatcataggaattgttgatgtcgttgtttagattataaatattaatagatgataccttaacttcttaaggattaattagtgtatcatgaagtacagtgtttttgttgagatttacactgaatagtcattttcaaggtctctggaaaaagtagtgaaacaatttaacaaacttaatcttaattttaatgtttttattaattaatcttcattaatgtttttataaattgatattactattatttgatatcataatcattttaaaatgaattcatgattcatataatctggtcaaagatctgaagcttttcttttaacttattattgattacgagacgataatggagtccaggtaatgtcaatataatgatgataagaatattatcaaaataatgggcatgatgctactatagatcttgcaaacaccaataatgtctggaactctactcgaattttgttttttctttagctttattaatttattattttattcctttttgcattttatggcagtatttggtggcagtattttttctgtttgctttctgggtttttgtctctttgatggaagaaagattccctcttgacaaataatatttggttagtatcaatatatgccccattttatttctacagaaacttaaaatcaaattactatataatgtataaacacagttacgtacttagaaactagtcggcattattgacgtgaaatgaaatctatcttttcactttattagggattttcttttcctggaatatttgtattgggaatccaatgaaaagttttcaacgactccatcttttgtcattatcatagacaaaaacgttatgtttaagaaaaaaaatcacgagcattgcagatttgtgctaatgcctttttcgtttattacaaaactttacgattatttattttgcgtcaacatatcgtacacagaaattactaacgcgaccatcgtttttcagttcactctttatacaacaaatcatcaagcaaagggataaaaaaactcagaaatctcaaaacacaaaagtattaaagaggaaagaaataaaatgaagaaaaaaaaacgaaaaagagacatatattgcacttcagaaatatcattccaagaaagggaaaaaggtgatgtggcatttgcagaggcgttggatcggtcatagtcaacatttagggaaatctgagggtggaggaaggagcttctgatttggaaggtcaccgtccaaaacaacccaagccatggtcagaccccaactcaaatgaatctcaatgtggcaatgcatcagccacacacctatcaccatcaaacaaatattagaataaaacatatagtttgtgagtactattaatcattaaaattagagattttgttgtgtaactacctaaatccaaaattgtataatacatgttattgacaaaaaaataaatatctactcataaacccttaccgggattatcggcaaggaagcggatggcgacccatccaccggaagggatattgatggtgtttcgttcgaccggatcgactaggttataatgttttgggtcacgggccgggttaaaattgccaaagccttgacccaccacataaaagttgaagccatgaagatgtatagggtgggcctcaatacccaagatgctagtgccctgtaacaccaattcaacagttgtcttgtacttcaagaccacaactttggtccctcttgagaccattgtgttgtttggtggcgtacccgtgtaattaaatggaataataggggcagttgggaaatcggtcatgaaaacattcttggatttgccaacgaagtatgattgtaatagagaagtcttgtttggtaagatgaaagacacgttgttgatagatgctgcaaatttcgttgtattagttggtccttggcatgtttggtttttaggacaagggttggttcctaaaccgatggcaaagaaatattgtttgtccacgacttttggcacgtttgccggaaatgtagaacttgccaaacttctaaacatctttgtgaaatttgcggcgtagctagtgctattgatgggagggagagatggtttaatgatagaaagattcttagaagacttggtatgatgttggtattggagaattcccgcgacggttgtattatcaattgttccttggcccgtgaagtacggtcttgccaacatgtagaaggttgcatttggataaataggtttggttttgagtagtacattggtggtttggcccgggccgagaagcacgatgttggtttgaaatggtttaacgtagcaagcatccgcttctacgaccgtcaatgtatgattggctatggtgaagaagagttcgtcattgagtgcagcattgattaatcgtagtagatacgtctttccaggtttcaccatcagtttgtatgtgtctaaaaaatatgtgcattgtgtgttacaaaaacttgaattggcgtcttattttaaaattaatcacatatagaaaagtgatcatttaccttttgtagagcaattgtataatggacctgggagcccattaaaagtatgagcatcagatgcatttggacctgcacccgtctgaagagcttgttgcaccactgcttgaggatcagcattaaaccactcacctatgcacaactcaaaaacattagttgttcaatcatttaatcaaaacactgttctaaaaaaacttataaaaaaaaaattatatatatatattgaacatgcacattgacgaactaattagccatttagacgtctatttaaacaagttttttgattttttttgttgatcaacttctaatcgatttgaatttgataaagattagagcgtccaagtaatatcaattactatctaaggtaatcatagaacattgatcagtcttttgggactcatacgtaaggtaaaaggttacgactaagaggacaaaacatatataattaccaaagagtatagggacttgtttgtagggtttgggaaaagggtaaggctgatgaagcttagggagaatgattaatggtccgtacacagtagctctcatccactgaatatgagcatgccaccacaaggttcctctttgtccagtcaccgtgaagttgtaaacataactttgtcccatccgaattggacattgtgtcacataggacggtccatccgcccaaccactccttagctgccggataccatgcctacatttatacactaatcaattcaatgaggctcaaggaacttaaagaatctgtaataaaaattaaagaaagaagtggaagattgatatatataatacgagtttctttataccaatgtatagaaatgttattggatacatgattaacaactttgatttgtagattatctccttctcttgcggtaactctaggtcctgggaattttccgttgaccgtcacgattgtttttgtcttgcacaaccttgtgatgtttttcagttgaatctgccagacgaaaaatagaataagtgatttcaaatgtgtatgagtatgattaaacaaaaaaaaattgagaggctaacgaaattatattttgtcccaaagtgagactaattaataaatacatcgaattggtagtgccgcgtgattcctgcagatgctgcatcgatgttgtaactaatggcaaatagaaatgccacaagaagataattcaaaacccacgtaaccatgttcaatatttgtttgaatattgaaggaaagttatatgttttatatccaaagtatgaaatatggttttctttttatatagttttctggtgaagctctcaagtggtgtatttgaaaatagagggagaatgttgtgcaatatataagtgagagaggcaaatggtagggttaatggttggtaacaaaataaaaataaaagtaaaaataatttgtagtgtattcggataagttatgatttatgaataagatgatttagtgttgatgttatagttgttccaatggttggacaaaccgagtgaattccaagttaactaattgtgtgctttaataactttgatgattatagctctacatacaagctttcgtaccaacaaatgattaatttattaaaaatatatattagatatataagaacagataatcgctagtcgagacaacaacaaaaataatcccatctgtttctaagggagtgatgttttctttgacaaaaaagaaaagaaaagaaaagggactgatgttttagtataatgcatattattgaggtaattaataaaatgactaaacttttgcttagaaatttaataagattacttgattacttttgaacaaaaagacttatgaaattttactgttatggacaattttcaaattaatatcattttagatcaaatttttattcaaacaattaaaaatctcaaatttaatttagttacttgaattttttttttgttaaagagttacttgaaaaattttcggatatcaaaacttcgaaagagaagtaaactttatatcaaatattattttatataaatatgtggcgataccaaagtaagataagtaaataacgagtacagtgatatattatagtaagcagggatgatgtagaggattgggacgtgtacgttggttgtttgaaaacatatgttccaacaaaagagagtcttgagtgaatctaagctt

SEQ ID NO: 304 - DNA, 131743 bp, Arabidopsis thaliana
gaattcagttttgtttcttttattagtatgggagcagcttcagaaagagaatgcagattttttcaacaagtaccacttaatacgcgaattagcgcgtcaaataaaattgtttaatagttttcttggaaagcaagtttctctgatgctcgagaatggagattttgatattagtactgcaacatgtacgtataacacaaggactaaaatctctaaataacgttcattagttttttgaaaattgggtttgttctgctttgtttgataactctttgcattatgcagctgataggtcagagttgagcactttaaacatgggaatgtcggcattggatgatacaaatggtctaacaggtaaagtcgaaaactcgatttcttgcacttttgacatgtaagaattcccttatgtttctctcttttgtagtaaaccagtcgcagaatcctaatgatcagcactatcaatttcattcttgtcagtggccaactacaactaatcatataccttgtaagcaaagactcaaacctttctctctttctgaatattgagtttgtaggtcatgattgcagctgggcaaaaactcgattatatatttcacttttgatttctaaagcttcctttggtttctctgtcttgtagtaaaccagttgccgattcctaatggtcagcaaaatcatatatggtctacaccaaataatcatgcttgtaaagaagagactcaatctttctctcttaatctatcatttgtttaacacttctagtacttgaccatttttttatgaataactcaactttctttctccataggtaccaatcttggagcttctaccattccaccagcagctaatgatcaatggtttccttataaggatcctgcgtgtaaagaaaacactcaacctttctcccttaatctctcatatgtttatcacttgtacttcaacattattatgaatgactcaactttatttctccataggttcccatcttggagctcctatcgttccaccagaagcttatggtcaattgttgccatatactgatcttgcgtgtaaagaaaacactcaacctttatctctcatagtttaaacccttttcgcatcaaagattttgaatgaatcactcttccttttttcctccatagattactatccagtactatattcaaccgctgcaccagcagctactactcaatggccgacatctactgattttgcttgtaaataatagacttattaatcttcctttctcattatattgttttgtaactcttctacttaagcatttgtatgattcattctcctttctctttcccttagatactggaggtccaactcttccaaaagcacctactgcggcatttgatcattttagagatggtttcggagaagatattgacaatagcagcccaaatttccagcagatggatcctttagcagccgcactacaaacgctacccgatgacatgctacaagagctatatcaacaatgccaacggcaatcgcagcttcaacagaacttctcactagaagagcagcaaagacttcaaagtaaagtaaacaacaacgggcttcaaggagtagtaaggccacccgaaaagccgccacaagacctatatggacaatgtcaaccgcaatcgcagctgcaacagaacctctcagtagaagagctgcaaagacttgaagttgaatatcgagcaaacagcaacgagctgcaaggagtaataccgcagcaacaacatcatcaggaacaagaagcaatgcagacacaaggagatccactgaatcgaatacctgttcaatctgaagcttcaaaccattcagatagtggtaagtagcaacacccctttccaacactacaaatttcttttgtcatctcttatcttacttcgtctctcttttcacttatgtgttagcacactaacaatggctcaaaaccagcatggtctccaaaaggcaacatgaatgacatggtctctgaaagagggagcgatatcagagagaggagcttagtgatttgctctagattagcttttttgtctttttgttaaatgtcgttggacgtgaaacacaagtctcgttgttctctatttagaaaccctaatttgtcgctcaaatgataaggtcaccaaattgaggaaccaatttgtcttgcttttatattgctcgtatacttaaacggctaaaagcatagtgagtcttttaaaaatgagaacagaggtgttttttttttggtatacgttctatatagataacttcagccttgatcaggactttgtatttccacactttcatatatcgtagacagttacccacaaaatcaaaaccatctgttacttaatcactctgtttacttcatatctaaaccaatatttcataatgttgctcatatagtagaggcagattaggttcattagttagtgtaaagtgtagattaatcagcttacttacacaagagttatatatctaaaagcaaacaggaagaagttgagaccatgtttctgcaaaaaccccaaaagactaaagatgcatttcaacaagtctcataagaacttttgtatcgaaaagctaaaagagtggccaactctacacaaggctaattcttttaagagtattcacatttttgcacaaaggtaaagaaagacgagttactccataagttgtcagatatagagcttctgcaccacttttgcttcatatcaataaggtgtaagaaaagatccttcacctgcaagttcatgtaaacctacatcagacttgaggctcaagaaaacgtctgaaacatcatcatcactcatcaaagattaattaacataccttgcaactgcaaacgaatcatcaaaccgtaacagttcgagaaagcacaaagacaggcgacttgcggaatttattcacaagcgagagtgattggaccttcccccaaatttcaccatcttcacgtctctccaacgccacctctacgcaccaaacatttacttccccgtaataatcaaacctagcctggctttgataacatcccaaaatcatcaacttcccaccaaaattcgtcattctagactcactataaacgaggttaggcaagtaatcaacacccatgacaggtctccaacccatttctcttggatcatacacgacaatgggagttacatgaaggtgatccggaacaacggcatacaacaaattatcaaccacacaatacaacacctgccagaaataccccaattgatttcctgcaggtccccaatcttcccatctacgtcctcttagatcgtaagccacacgattgttaccatccaaaatgtaaatcttattatccaaaacgaaatgaacattaaacggtgctttcgaacgaccatagggggataatacactaggcacattttcccaagtattagtctctacattgaacacttcgacccaatcatcacttcgtttagtggaacctcccaccacgtaaatcattccgtcaatcactgcagaagctgcgtaggaacgagccacttgcatctcctggagatagcgccacgtatggaatctgcagtcgatgacaaacacagtctttgcgcgtcgattcaagcttctgagtccacccataacgtaaatcttgtgtccgattgtgacggtagtgcatccaggaaacatgggaggaagagatgtgactaagctcaattgtaaagaggtattgtttctccgttggagaataaaccatcttggttcttcaaaatttggggacgtgaacgtgatcaaggtataaagaaccggttccgtcgagccgatgagcgagcgagtttggaagagatccaccgaagagattacttgacgaaaggagtcagagaggagagatagcgtcgggtaatgacatctccggagagtcgcgatggtgcttacgattagttctagtggcatttgtggaggaatctgaggaacattctctacttcttcttcttgatgatcgtcttctttcggtttctcgttttgattctcttcttctttaccttcttgcgggttcttgtgaggttcttcgggtttctggtttggatcgccgccgttagagccgtcgtcggaagtttcagagatagaagccatcgccgtgtgagtgtgacgttagcagcaacgaattatctaactgaaagtgagaatgaatttgatagttgaaaaaaatgctcgtatttatagtacagagaacgacggcgtaacgatttgctaaaatggggcctttaaggcccataaagtatctgaaatatgaattgagtaatttatttatttatccaaaaaataaaaataaaataagaattgaaagaaattagaaagacgatgatggagaaaattatggagtatctgcaattgagcgatgaggtggttgacgacggtgaggcaccgcgagttgaagaatttttaggtgaagggaaaagcttctacgagaattttagtctcagaggaatccgagtcaaccgagtcgaaccgggtttcatttcctgctctttcaaggttcctcttcgtttgacggtaagtctttctctcaatcctctaagccccttctattttgattaattgtcgaattagcgtgataggtttttggaaataagctaatttgaggtttaatggcattattgtcagatgtttgaagatgatagttctcggtgatactattagtctttggaaacttgagcagaatctagaagatgcttgaacttgattgtgtcgtttttttcttttattggagacgatgttgatattttaatgttttgataatgtcaggacagagacaagaatttagcaaatggtgcgattgcaaatcttgtggatgaagttggtggagcacttgtacatggcgaaggcttacctatgagtgtttcagtggacatgtctattgcattcctttcaaaagctaagcttggtgtaagtctgctcaagtcttttttcaatctgtactttgggactgtttgtttgctatagaaatggattgagagatatgatattgaaatggaaatgaattttcaggaggagttggagataacgtcgagattgttaggagagagaggaggttataaaggaacaatcgttgtagtcagaaacaagatgaccggggagattatagcggaaggtcgacattctatgtttggtagacaagctagtaagctctgagtccaacttttaagtcttgtatcactgtaatgtctgttttcaataataagattatggttaggtaaatttggttaggtcctttgttctttctggttgtgaatctaaaaccttggtacatagcttataaagatcaaaccattcagtaactgtgatagttatgttgatgaggatggtatgatatgtctcatctatacaacattgaaagctgtttaaagaggaatttgaagaagcttcaagagaattttgttgtctatggtttcagcttggatttaatgtgtatgttggattatcaaaaattcaaaattataatgtcaacaagagtctacaactactgtaacaattctcttctcttacattggaaactaattttaaatagcagaagcaaaaagtcaaaatgtagatatggccggaaattcgcactacattttaactgacaacggttcctattgagacgaaccagtagtaacagcagcatcagcagattgctgagaggatcctgaaggtgctgcagacacagagtcaggtggtggagcagagactgaacttggatgtggaggattaggccttgaaccgggacctggttgttgtgggtaatcatgatcagcttgttgtgaatggccatggtggtaaggaggatactgctggtaaggtggttgcatatatcctccatatgatggtggcgggtatggctggtgctgaggatagtggccatgtggtggcatagtgtaagaagaagaagaagctcctctgttgtcactggtgcttgaaccgctttctttggacgaactaactgcacccattctctgagggtccattgatgggtaaaatggtctgtcttgatgaggaggttgtggtggtggtgggtgcatatagtattgtagcattggtggaggttgattctgttgctgagatataactgctcgaggtagtaaaccactatgagccacactgccctgttggttagaaccatcttgatcaggtttgggaacctgaggtcttccccatgtgagttttagcctctgaccgttgacaactagcctgttactgagctcttctgcagctttctctgctccttctcgggttgtgtaagtgacaaacgcacatgctttctcagccaagattctgatggattcgatttctccatgggcgtagaattgatcacgaatgtcttgctcaaggactctcgagtttagcccaccaacataaagcgttctgatgctttgatcctctggagattccaaagtacccatctccccagccttgccaagtaacttcaacgcaactggatcgtttacactgcaggaagtgaagaataagatgagaaaacagttccaatatcaccaaaataacagccagtttacgcacacaaactgatgtatttttcataactctctttcatgatataccaaagcaagaaattgaggagtaactcaatattatcatactcaaacaaaatgaaagttagaagtatgcttacccataataacggtctttaatgttctgctgggataactctcctgtttcaggcatctcatgacggtatggacactcatcacctcttgtacactctcccctaatgaagaaactacaaatatgagctcggttccttttgtagtaaggcgttgtcctttgaagcatacgaatggtatcgttgggccgaatcttcccaaaagaagactcataatctagtccagctctcgtctacacaagaaaacaaaaccatttcaataggccattacaaagtagagaaactgtatagccaaatctcaaaccaatcaatactcaaataatataactagttagaacgcagagtcaccatacctttcgatcatgctcttcagcgaaaaactctcggttcacatcactttttgggatagaatcatgagtactaatgttgagcgccgtgtctctgacctgaactggaagaccatactcaagatccaagagacaaacttggcacacattcttcaacttgcaacatgtctgacaaacttcagtcttcttgtatctcgcatccctaccaggtcgccatctgaaaaccgtgaaaggccgggtacagatcttacactctttatcgtaattcgcctttgtctacataccaaacaacaacaataaatcaatcaatcaatcaaacatgaagctgcacatcactaccagacataacatgagacagtattcaatgaattacattccctctaagcaaatttgatcagaacaaaccaaagatatcattttgaactacaactccatgaattctgatttttaccaaaggttatgaattgtatattaaatcgcttaaaccctaaaatctcaaatcactaaaattgcagcttcaacactaagaaacataaaagcattaaacaagctcgaaaatggacaaatgaaaggagatcttaataaagacacatgaatgttaaaaaaaaatctagctaaaggcaaggaaatcgaatttgtttgaggagaaacataggaagcgaagaatataccattctcacgtaaggattgtcaccgagacaagactcacagatgattgggaaatcagaacgttcccatccatcagcctcgtgatctctcagtattctatgcgccatttcctaattctcttccttcctcaatgatttctggatttcttcttcagtctcgaacacgaagattaccttgaagagcagatttgctctcgtttcgattttttcgggaatctttaatattacagctgctgttgggccgaatgtttgtttggcccaatttaaacccatgaaataagaaagcttaaagtgatggtggtgtactgaaataaacaatacggactcacacagatgataattcatcgtcacacacaggcgggaacaaaaataccctaaaatcgctaaatggcgccacaaaatctcagcttataatatcacttcccgctaacaattgcaatctcctcccagaaatttcaacagctctaaaaaccctaaccgtttcgattcacactctaacctttcgataatttcccagaagatgttggagcttcgtttagttcaaggttctctactgaagaaggttctagaagcggtcaaagatctggtgaacgatgcgaacttcgactgttcgaccacagggttctcgcttcaagctatggattcgagccatgtcgcgttggtgtctcttttgcttagatctgaaggtttcgagcactatagatgcgataggaacctctctatgggaatgaatcttggtaatatgtctaagatgctgaaatgtgctggaaatgatgatatcatcaccatcaaagctgatgatggtagcgacactgttactttcatgtttgagagtcccagtaagttcttcaaatcgatttttgtttgttagggctttggttttgttgtcaatgttgatgctattggtgacctgattctgtgtttataggtttgatttgccagaagctagaatatgattgtagagaatgattcagtccatttcttgaaagctttagtttgtaagagatgaaagagaagataaaatctatgttaatagagggtttttggtttggaataaggtttgatatggctttgtttttgtgtagttaatgatgttattagtgatctgaactgttatttataggtttcatttgacagaaactagaacttgcttgatgagaatgagtccttccatttttgttttcagaataggtatagtctctagcttaaagactatagtttgaaagtgaatagagtttcttgatttagtgaaagttaacagaggaactttgtttgatattgactatgtggtgttaatctcattatttaaatggtgttgatgatgcagcacaagacaagattgcagattttgagatgaagctgatggatatcgacagtgagcatttaggaattcctgatgctgagtaccactcgattgtgagaatgccttctggtgaattttccaggatatgcaaagatctcagtagcattggtgacacaggtaaatgaactgtttgtttatttggtgtatcactgcgaggattctctaatcatgattctggttttgatgttatgattttgcagttgtgatctcggtaacaaaagaaggggtgaagttttcaacagcaggtgatatcgggacagcaaacattgtgctcaggcagaatactaccgtcgacaaagtatgaacaatcactagtcatctagagagatttgtttaataatctgtccaatacaatgttgaagtgaccttatgtttgtatgtgtgttttgcagcctgaagatgctattgtgatagagatgaacgagcctgtttcgctttcatttgcattgaggtacatgaactccttcacaaaggctactccattgtcggaaactgtgaccatcagtttgtcctctgagttaccggtcgtggtggagtacaaggtggctgagatgggttacattcgatactatctggcgcctaagattgaagaagaagaagacaccaaaccagaataatgatgaatgtttgatagtcttcgttcgagtcctttgttgaaatgtctgtcttgattcagttgttttctggatttactatcttaaggcaatgctaaactagataatcgtatgatgtttgtctttctgaaatttggaaaagcttgtttataacacttttcatctgtttgttaaacattgaagaaaaagaagacacgaagccctaaaacacgtttgtttgtggcttctgcaacctcacgaactagtgttgattgatgtttttggatgcttttacaatttgtaaaaaacatgtttaacactctttacttctgtttgttcttaaatttggcaaaaacaacaaaaaatttgaactttcaagacacaagaatttgtctgcgtgagaaatagactcgagaacaatgaagtaagacgagaagtgtaacaattaatatcacatgtgcattttgtttagagagatagcttccaatcttctccagcatacactgcttgatccccaagctcttcctctatccgtagcaactgcaggaacatttcaacagtgattcagctttttaataaagtagtttctacaatgaaatgagaacactatctagcaactaaatgtacatggctgctccaaactcaatcattatggatctataagctgaggctgcattagccaaaagttgaagaaactgaaacttagcctaggttgctaaagattcacataccacaacataactcagctacttaaaagctaaaaagaagctgatgataatctgatgaaagagctatgatccaaaattccaatgcaggttactccacgtaatgtagattgttctagtgtaattgcataaggggtactgaggatattagtttggaaaaagatccagacctggttatacttcatagtacgttctcctctgcaaggagcaccagctttaatcacacctgttgcgagacccacagataagtcagagatgaaagagtcctctgtttctccacatctatgagatgtcaccacaccccactgggcatcccttgccattttcactacttcaatggcttctgttactgtaccaatctgattcacctgtatcaccgtatgcacattatgtctttgtcgttcttaggcagtaaacatacaatatgtgcacaggtaatacatagtaataaacaaaataggacggacgaaataccttgagaagaagagcattacaagaagactcctgtatggcacgctcaactcgttttgaatttgacatcaacaaatcgtcacctaccacctacaagagtttaacactgagaatttagacaaggaaaatgattgtacaagaagatttaagggtctctctctttagatatttgactctgagaaaagaatcagaagacagtgtgatctgaaagaacacaaaatctatgtgaaccgttaatagtaggggaaccgagttggacctgacatattccaagactcgaaaaatacttggtgtgttcccagtcctccttgtcaaaagggtcttctatagacacaattggataatctaaacccacaaggagaccaaacagagaatctggtcgttacaatactgcaagagtactaagatagacacaaaaaatattgttcagacgagccagacataccattacaaatttctttgtacatatctatcatatcttccgctgacttgaaattttgcccagatttatttggagacttgatatctaaatcatacttggtacctgttcaggaaagaacagttccacaaggtaagaaataatacacaaaaacgtataacatagttgaaacttgcaagagcaagatattgataggctacacatttgatgatttaacatcttattcgtctcactagccaattgtgaatgacaatgccgagaaccaaaccaagactatccatgactacaagaagccgcaaaaaatcagttagccaggaagcagaaaattacctaaacaaaaattagtggcggcaatatcaatggctatctttatcttatcattgtaccctgttcggttgatagcttcttttacaagctccaaaccttccttgaggctgcatacagttgcaattacacatattaggcactaagccatcaaaccataacatggttttctcagtttcgacaatctacagatgcaagcagattagcatcagagaggaaaaatatatgtacctcgagatatctggagcaagaccaccatcttcaccaacattacatcccaaaccaccattcttttctgaaatgacagcctgccataaacagcaatagatcattctcaccttatacacaaatttacggatgcaattagaaaggtaacttctagaaagccatatatctttgaaaattgacctttaaatgatgatatgtctcagatccccattgcagggcctcctcaaatctacttgctccaattgggagaatcataatttcctaaacaaattatgaaaacacaacaatcattacatatgtaaatgaaattacttgaaaaccaaaagatttcttgaagaactttgagaaacagaaacgttaatagtgaacttaatgtagaatacctgaatggcaaaagtattcgaagcatgcttcccaccactcaaaacagtgaacgcaggtacaggtaacaccatgtttgctctgccactaagatcagaaagatgcttgcacaaagggacctgataataacttcaatcaaaatctcctaactaaagtaggcataaaatacataggataagagaaaatgttatcattcatacctctttctcagcagctccagccttgcatgccgcaattgacacagcaagtatagcattagcaccaagttcactctgcaagatattcaaatcaaattaatcatgaggagcaatgatatatgaacttgttacaatcctaataaaagttcccacctaccttcttttcagttttatccaaatctatcatagcctgatctatctgaccctgaagttttgggtccataccaatcaacgcctcagaaattttttcatttatgttcttaacagctttagccacactgtttccaagatacattcctttgtctccatcacgtagctcaatagcttcataccttgagaatcagtaaaccaatctcctcatgtcaggcttatcatattagagaattgtatatcaatcagagtaagaataattctcacgttccagaagaatcaccactgggaacagaagcacgaaaaacgcctttgttcgtgtgcagatcaacttcaactgttggaattcctctgctgtcaaggatctgtcgtgctttaaccttcgttatcacagatgatacagctttcttcagatgattagcctgcacttttccaattgaagattcaatgagtaatgtaacataatttcacttcgatacatgtaaatcaaaattcgaaggaaacttacgatgaagagaacgggatctgaggttttagcccttacggcggcattaacggcgtcttcgattttccgagaaagcatatgcttgtctaaatactcttgcacagacatcttcttcttcttcctcttccacggacttctcgattcgaatcttcaagcaaaatttcgatgaacaagtttgaatctgaaattcattttccgattgactgtattttttggttcacgctccggttcaggctccggttcaggatccaataagcatattcaatcattaaaacgatgagtttcactttacaaacacatgcttgccgtctgaggattttgctagtgcacatcactccgttttaagtcatgcagatttgaaatgaaaagagtaaaagcccattttaggcccaataagaagtctctcacgtgcgattgccaggttggaaccgcttttttatctctcataaagcacgtgcgagtgcgacgatgttttagtaactgctctccttaatggaatccagctgtcattcacacgaacatatttttttacgaaattcaaaaaaactttttatcacgagccattaatttttgaattttgccacccgttgccacctcgatttacgtggcattatctaaaccgtcgattcgatttcgaattaccaaatattagccgttaaaacctccttttctttataaatggaccctcctcttcttctctctctcataaaacaaaagatcctctctgcttctcctttccctttttcaaaatctctctctctctctctctttttagatccagttttagggttttcttctctgtgagcgaagatgcgtgagattcttcatattcaaggaggtcaatgcggaaaccaaatcggttccaagttttgggaagtggttaatctcgagcacgggattgatcagacgggacggtatgtaggagattccgagttacagcttgagagggttaatgtatactacaacgaggcgagttgtggaaggtacgttcctcgcgctgttctcatggatttggagcctggaaccatggacagtgtcagatctggtccgtacggtcagatctttcgaccggataacttcgtcttcggtcagtccggtgctgggaataactgggctaaaggtcactacactgaaggtgctgagcttattgattcggtccttgatgttgttcgcaaagaggctgagaactgtgactgccttcaaggtatttgaaatccgtcttccttatttaggtttttgtctatttaggtttttggatctgtaaatttaggttgggtattggtagtgtatgattgtttttaggtttagatttctgattttgaactgtggaatacggattcggttttgtattcgttgtttgcttatggttttggttgtttggatttacaggatttcaggtgtgccattccttgggaggaggaactggttctggaatgggaactttgttgatatctaagatcagggaggagtacccagaccgtatgatgatgactttctctgtgttcccatcgcctaaggtgtctgacactgttgtggagccttacaacgcaacactatctgtgcaccagcttgttgagaacgctgatgagtgtatggttcttgacaacgaagctttgtatgacatttgcttccgtacactcaagcttagcactccaagttgtaagtattccaatgttcttcgattatgagtcaatgttgttactgtatctgtctctgtggtttattgtttcaggcttagttattgattagtattgaaacttcactcacatatttttttgtttgttttctgaattgtgcagttggtgatctgaaccacttgatctctgcaaccatgtctggtgtaacctgctgtcttaggttccctggtcaactgaactctgatctgcgaaagctagctgtgaatctgatcccattccctcgtctccacttcttcatggtgggatttgctcctctcacctctcgtggatctcagcagtaccgtaacctcactgtcccagagctcactcagcaaatgtgggatgctaagaacatgatgtgtgctgctgacccaagacacggtcgctacctcactgcttcagccatgttccgtggaaagatgagcaccaaggaggtcgatgaacagatgctgaacgtacagaacaagaactcctcctactttgtggaatggatccctaacaacgtcaaatcaaccgtctgtgacattccccctactggtctgaagatggcttcaacgttcattggtaactcaacttcgatccaagagatgttcaggcgtgtcagtgagcaattcactgctatgttcaggagaaaggctttcttgcattggtacacaggtgaaggtatggatgagatggagttcactgaagctgaaagcaacatgaacgatcttgtctctgagtatcagcagtatcaagatgcaacggctgatgaagaaggagaatatgaagaggaagaagctgagtacgagcaagaagaaacttattgaagaaacagatgataagaacacctcaacttccagttgctgtttacttttaaaactctcttctattaagttcttatagtttctgtaactatcgcttgcgttattagtagttatgatactctgcgtaggctaagaggatttatcaatcaatattcaaacaatctattttgctaaatcaaaatccatccatagtattttttttctttgtttcattatataaccttttgttaattttgactatgtgaattcggtgaagacttcaccatctttcaaatataagaagcagagtagtagtgacaatggttataagcaatataagaatcttcttggttaaattttggtgtggattatgaatttgacgagtcaatttgaaggacgaatctggatttaagataaaaatagtataaactccataggagaatacaatggttatcagttgttttcaatgtccatggacccaaatagatccctctgcctcttaagctcttcttcttcagcctcctccttacgcttttgttcatccttatactcagcaacagccttatcaaaaacgcttctcacatgtctgttcatttgcatgagctcttgacatgcatctttaaaaacctctcttgctggatcacctaaaagccacagagccaacacgttttatgttgttagacacacagacaaagaactcggataagagttatccaaaaagaacatagcttaactctgatgaacagagtttttgaaaaacagtacctgttgtctggacccggatattgacctgttcaagggaaggatgtgggatggtgtatgcagccacggttactctgggactgcagaattgaaaacagtactggttattgacataatcatcattgtctacacaccagcatatcaactccatcaacctcaaagataagataatgtgacattcattgaatacaatgagaatctctaacaacataacatgaatgtaaaccaacatttaatcgaactctcaagtttcacaatcacaatataatggcgaacttaatggaccaaactcatccaacgaaagatatcggaacaataatgcctcgtcactgctgtctctatctaagagctaattctagactatcttttctagtctctaaccacagaacatgaatctgaatcgaactcaaccttcacaatcaccttataatggcacaaacatacaatgtgcacactgattattcaaacaaaatttgattatcttcacaataattctaaccaaaaacaaaggtaaagacaggtaagagattcattcctaatgagggaaactatgaactcaataatcagaatttgagagtgtcacgaactaagtatgagattataaagctaaagcctttctctgtgaaagtgtatagcttcttctatatatatacataacagattcaaaaggattgaaagaagaagatacttactcttggtttaagacgaatctaacagcattagcaagtgtgtgatcttcttccgataaagtaaacgaagcatgactaacattcgtgaacgaaccgtgctccatatctcaccttcttgctactcaattccttaactcaaaatcaaaaatccaccaccaactagaaaacacagaaagagaacgacttcaattgaaagctttgaatagctaaacaaacccacaaagaaaaactcgaaattgaagaaaatttcagcaaaaaaagttgagagagtaagaaagaagatacctccaatagaaatttgctaaaaccctaaaagcttgattagtcggcgacttttagtcgtggagaagctcagatactttagcgtaattacatctataccctttcgtttgatgacgtggcgtgtaatgtctcttaaaccctaattcggctgtgtagcaaaagagaagcctttgttgtgttctttacctctcttcacgaaatcccatttgagaaagtaaggatttatgatcttcaaattcaagtatgaattataaagtttcgatttttacgaatcattaattttgtattcaggtactgctaaaaaaatggcttctcctattcccgtcggcgttactaaggaacaggttcggtttatttgctcgtcctttattgttaatacatcgtaaagctccgatctttgatctaattagacaatggaagcttaagtttttctagctgtctctgtgatgacatataggtttcaatgtttttgcaatgcttagggtttaaattgtatcgtgattcagatctttaagccatttattagatttggattggtgttgtcaagtttctcattttgctttttttttttggtgtcttggatttgaatcaggcgtttagtatggcacaaacggagatggagtatcgcgtggaactctttaacaagtactgaatcaaacacccatttggtttatctttcgttatgaaattcgattttcacttgtgattgcttatctggtttaattttgttttgatcacattgtttagggcttcacttattttcaaatagtgatatatataagctagaggagtataagtttgagactgctgatatgtcgaaaatccttaggctgcctgaattgtttatcttgaggaggaaatctaaaatctttctatgaggaattctcgagttctgtgcatatgtattcagctgttatgtagagtttaaactttgataacatatgacttaggtggtgttctgttaatattcatttccccgggccatttgtgattcctctggttagagattatgaagaaagtcacatctttatatgtgtttcttttccttctaatatactttgtggtctattgtgattcctcgggttagagactatgctgacaggccttgttcttgtattgcaggcttgctcaaacatgctttaataaatgtgtggataaaaggtaaactatttctccttttgatgttctataattacgtcgtggaacttgtctgcaattgttgaaacttttcttagctgagagatgagtaagttgcacctgttttgagattctttgcctaattctcaggtacaaggaagctgagctaaacatgggtgagaatagttgcatcgaccgttgtgtttccaagtactggcaggtaaggctctctgatacttcaacaattaacaatttgatacttcaaatcttctcatagttgactactattattcaaattcaatgcttatgttctttttcattaaatttgttttcaggtaaatggaatggttggacagcttctaagtgctggcaagcctcccgtgtaatccagtttaaaggcaattattacagaccaaaaagctcatggagggaacacaactctgttctttgtttttctaaagtttaaggcaatcttgtttttattgtcaagaaagttgcatcacatttttggcgctgatttggacaaattatgcaattccatgtgaacccattattattacctaaggggtgaaatgaaataacaaatcgaaaataacgaaacacatctatattaccaagttgttgactttgtatttttacattgaagggcaaagaaaactgtgtatcctaaagcacttaagtgaagaaagttgcaactaacatgagcaaaatcagcgtagattctaagatttggtgatcggagacataagatcaatgatcatctgctacattgttctcgtttagaagtctctgatgatcttctttgctcttgttcttactgtcctttgtgctcagtggaagtaaaggcgtaggagaaggtccactagaacgttctgccatttctgcaataagaacacgttcaatatttcttcagttagagcacaaggttgaccaaaaactatgtgcagttagaatggtctggcaaaattagagaattgtttactacatctatctttgtaataatcttatcttttgggtgaataacaaggtagccataccagattgacacagaaagtacggaagaagaaaagcagtcttgaggtttttgccaacatagatgacaataggataaactaggagtggagtaacaatctggttttcgtaatattttgggagaatgatgagttattgagccaacttacctggcagtttactgtcaacgtagaacattacaaggttcacagtatacctgcagaagaaaatgttgaaatgttgagatagtgtaaaggaatcaatattgtcaaacaagataattgatttcttctttttttctcaccatgcaacaacaatgtcaactgtgtaatgtttccttgatgctataatcaatatgctctgtattactgccataagccaagccaagtgcttgatccacctggggatttcacaaacatgagatgtaagaatcttgtgaagaagttatgaacttctgtggaacaatataagagacagtaccttcgtgtgccgtatctttgatatgtgcgtacaaagactaaggtgaatatcgtatgtgatgaaaatatcagatctccacaaccatatataactccatcaggaactataattttgaacacaaaccttaatcaaatgccactttatgagttattctgtaccattctaataatttgcaatagatgcaattcaaactaacagttaatcaagagtacttcaagaacattctttggaggtggaatcttggcgagcttggagccctaatagagatatttgatataccagggagaagtcagtacacaaccaaagaaaaaagttacaactaagataccaaagcttaaacgccctgagaatcttacttctcgacaatgataattcggcccaggaagctgtgttgcaaagaatgttatgatcctcagactttgagaagcctgaaacatatagaagcttaatcacctcaacaatactaaactctatcttctttgtaagttataaatagaagaattaatgtagtggaagtgatacttacagctaaataaacaaaaactctgcaccatatcaaaactgtacaaatctttttactgtgggaaacaaaaggatgaaatgtccactgcaatcaacgtaaaccgaaacatagaaccataagatcaatccagtacagcgagttgaaggagaaaaacggatacattagaggaaacttaccaagataaatgatccaaagatagtgacaaacacagtttcactgaaaaatgctttatcttgcccaagtgcctgaaggaacacatatcaattaccaaacaaaccagaggtatgatacataacaaaattgatgagaaaagtcaaagcaagtatactaactggaagaataaagaaaccagcatcttgaagagtaggaccaggtcggtgtaagtagtgaactccatgagcagcaagtccatgaatgtactgatttaagaaggaaccagaaacaatgacaatgcaaataggatttatataatgaactaactttaaagctcccacttttaagcaaactactgaaacaaaaaaaaaccagcataactaattgatctgtcacaacttagcttgatcatatcaccattcaccaataaagcaagactataatctaaacacaaagaaggaagcttaagaacctgaaatacaagtccagcaagaacaagcttccatttttcagcaagaagagaagcttctaatgtcgcttctgagtaaattcgtctccatagcttcacatacacacacaaaaccatggacgcataactatcaaactaaacaatttcaacatttatcttttgaaaagagagagactctgattaacgcaggaaaaacagaagaacaaaaaccttaggagcttcgcgatcaacgtaaaccggcatggttaagattgagaatgaacattaatctctgcagcaagatcaaatgcaactgcttttgtaagaaagacagaacagtttcattccccgacacaaatacgagggcaatcttgaattgcaccgaccagtttgattcacctgaattgacaagaatatattcccaaatcaataattttgaaggaaccgattcaaatgagtctttgcgttgtcggagaaaggactcacctttttgtgcaatctacgcaaaccaaagccaattctgtattctaaactttatatagaattaaatgataatcttgaacagcaaggtgctgtggtgtagtggttatcacgtttgccttacacgcaaaaggtctccagttcgatcctgggcagcaccatctttttcctcttttttttttttgcttaatgtttgcattttatggttttaacaatgctaactaaactactaaagtaacaactaacacgacagagtttatgttacatgatcatggtaattgtaattgaagaagaaagaagtcaagaacataagagtttttattagcttaaatgtggatattcgattacaacaagtttcacaaatttctctatttaacgtaatctacttccacgccgtaattacacagaaaatacgaaccccatcagaagagaaaagaaaagaaaaaaatatatataacaagattatttgaagaagcaactaaaccctcccaacaggagacaaaggtgggtggtgtgagagatacctagccggagcctcagcttcaataggacctgaaaatgacttcaaattctcgttttgaatcgatgacatctctcctccataagctttcttctctacacgtgaagtgttgggttccacggtggtctttattaacggatttcgtccctcgttaaccgctatacaaatggagaatgcttgcaagagtgagagcgatgtattgtactcaaccgcgtaaacaccttctctgtatgtagtgaaactcaagtatggttggttgttattctcctgtactcctccctgcaacaaaactcacattagtgagattcataatttaagccaaaggttggtcttagtattcagagttttgagatgttatataacaaacctgaaagaaaagcttgaaggcatctgaagtggttggagaagggtttatgggtttattatgctgatttgtgaggattctaaggttacatcccgtgtcccagcctccacagtcacatgatccatctgatttccatcgttggatcagtgatgacggccctcctttgtgcgggagactgtgaactccacttggaagtaccactgttgcgttaacctctgcaaagtaatctccaagagtggttgagcttgttgtgtctgtaagttttggtatcttgatcaccatggcagctagctcgttagtccgctgcgattcagatgcaacaagtacaaactctctagttaagaggttttccgcagatctttctccagcgagaaatagaggcttaggatctgagactctcatctgagcgacaatgttggatgtgtactcttggctttggactttcctgctgttgttcatccattttgcatttttcttctgtacttcttgaacagtgaaaaaagtatacttgtgtccatagtcttccttctctgggagagtctgttttcttattgtagctgctgtaatactttgttccttttcaaccgcaaaagtgaagagtggttgatcattcttagatgtcacacgaaatagagcctgaacagttgaagattttccatttctcgacagaaaggatgacgaagatggttgacttgaaggtgcttcctttagtgatggctcaggagatctacatgagtggcttgattttggttttattaaaggatcgagtaaccttctcaatggactagacctgcctctgtttgctgcactggttttatcaaaagaagagctgtcactgaaagaagaggcagatggattgtctaaaccagctcgtgatgaaataagtgctgtgcttaagtgtggaggagtcttagcatcttcggtgttggagtttttactggactttccaatgctgaagctgagtcggcgaaatggtgaaatgctcctagctctttctgataagactttagctggtttctgatctgactgtttaggtaatgtttctgttgaccttctatctagagtcctgcttctagagggactagattcagcctttcttgatcgtggagctgaacatgatctttctgataagaagctgatacgttttaagaatggcttacttcctccatcagcttcacgtcggaaaggacctacatcagagtcaagaactgcagttttcccatgcgctaacctctctgtgaacccctttcggttactttccgccaatcgctcagctagtaacactttcgaatcatagaacttggacaaaccaataaactgtttctgagaaacaatccctggtacaaatacagcagcaggcttttcttttccaaagagatcatgaacacgaggatttcggattctctcttccaacttctctcctttcttcttaaaatcctcggctagattctttgatattatccttgtgcaagaaggactatctggcttcgatggactaaagagagttcttgtctttggaacaatcttaacatcagtatctttcttctcattctgttggaccgcagttgcacgaggggtctgatgaaactgcccatctcttctatgactgtgagaagtatcaccgttatcttgaggtggctccaaatcttgaaaattatctccaggcttagaagacatgagataatactgcaaaggagggtgattgatctttttacgaaaaggagaagcacaaagacctctactggaatcagtcgatgactcatcagtccagagagaagacgatgtacttgtattagacaaggaagacctcgtatgcttatccatcagtttatcaatcccttgcatattccttagctcctgtgaaccaataacaccaccagctttaacactcttgtcttcaactttatcacatttctttatataactcggcacataagacttgtacttcacaagatctctttctcctgaagcagttctacctatccttgacttcaaacgattctccaagcgtttaggacatacatcttcaacttttttcgtgatctcgcggtggaaatcggagtaagataacccgcgtttatcgtctctaaacttatccggtgtaaatgcctttgagctttccttagttaataccttcttctcagcagctacaaatggtggtctatcacaagaacctttcttcaactccaaacgacactccatctgtttccaaagttccaaacgtttcactcaaatgactcctcagtctcccattaaactgcagaagcttgaaacgctcaacattttttttcactgtagaaacaaaaaaaatggtaagtcataacaaataccaaaaaaaaaaaaaagtacatctttcttatccacacacaatgtaatagaattacaaaacgaatcttcatagaccttatagatccttaagaatccgtaagatctgattagaagaatctctacaagattaaagctgaggaaaaaaagtaaaactaaagtatcaaaagaaccaaaacaaaatcacattcttctcaaactttcttaatttaccaaagaagtactaaaaaacaagattagtaacaggaaaggcctaaagcgtacacacacaaagcaggaatcgatgaattcacataacactaacaccaggactaacacgagagtgttattggcagtgtcagagagtgaaaaagcttggaaaaaaatcgaaccgtacctgaacggaatcagttcgtaacacagagactgaagcagattagagttgaatcagatcaggagaggaaaaaagaagaaggaagaacagatctcaaatcgtccgtgaaatccggcagaaatagcgccgacgaagctgaccctatcagctacagaggtagagagtaagagaagagagagattgagctttgttaattgtgtgtagattagagagtgacaagtagagagagatagagagttgttgaagcgagtgtgttttgttcgccgagtctttcgtcgaagttgttttttttttttcccaaaaaaaaaaaacatatctttttgtggccgacggatttagtaaaaaaaacagtataatttttataaagatgggcccaatagtagaatcgtacgctcaagattccgtaatgaacgcgggaagttacgtcattgtgaccctacttacttagtggagctcaatgtccaatatacaccgttggatttgtttaatcctcctttagatgggcccagtttttagtaatattctattcaattcagcacgttatacaattgcttttaaagcccatggcccataatactcagacagccttaaatgcttcagattaacaaagaaaatgttttagattttatggatagtgtgattagagtccaattattttggaatttaattcggttaaccagtcgaaccggataatctgtagaaatccagttttttttttggaagactacatatttgtctaaagcccatgaaggcccattaaacccaacgaacacaaacaatcttcaaaatgctcctagaattttctggattcacctgatttttctcatagacgtcctctagatgtttctgtattccccataacaactcgagaagctcgagaaatttcggttagtacctttaaatagcttcaaaaatccttcgtgtgttctatcagaaatcgaaaaatcaaagttctcaagaagatatcaacaaaaaaaaaagtaaattctttaaaatgtcgatgattccaagtttcttcaacaacaacagacgaagcaacatctttgatccattctctcttgacgtatgggatccattcaaggaactaacatcatcatcactttctcgtgagaactcagcgatcgtgaacgcacgtgtggactggagagagacgcctgaggcccacgtgtttaaagctgacttgcctggattgaagaaggaggaagttaaagttgagattgaggaggatagtgttttgaagatcagtggagagagacacgtggagaaagaagataagaatgacacgtggcaccgtgtggagagatcgagtggacagtttacgaggaggtttaggttgccggagaatgtgaagatggatcaggttaaggctgcgatggagaatggtgtgttgactgttacggtgcctaaggctgagactaagaaggctgatgttaagtctattcagatctctggttgagtaatgggttcgagttttatcatcggagttgcttgtgtttttgtcatggttatggttcatgttttacttgagtgtgtgagtactctatctaaattataataatctccgattgagctatgaattatgatgtatcggatacatttgatcctaatgaagtatggaataaataataattattaacctttgtctaaattcaaaagaagtttaaccgacgagatgatttcgcttagagttcgatttcggtttaactaaaccaaatcaaccgataccgtgaatcaagacggaatcaaacccaaaaactgaaaaggttcacattatataaatgttatattttgatttagattattacatcatttctttcaaaatgattaacattttgtttgataactgaatatttcttctgttttacaatgtcattcatttcaaatgtttggcagacaatgaattggccaaaaaatagactcttcaaaacaaaaaaagttgtgtgttttacaaatacagtcgatacattaatctctcagttttaaacttttcaacatatgaatcttaaaatataaattgtagaacgtaatcatttggagatttgttatttcttggtcggctaattgactggagattagaaacactaagtgttggtcaaatatcttaaaacactaagacgaatgacgttggcaatgacgtgcataccttaaaatataaatcagtccttttctggtgtgatcttcaagatatccttggatacaaagacaaagagaaagcaaaatggtccttttatttatttgtttatttcaccacccataacttcatttgtgtatagaatatagtaaactcaagtaatcaagcaagtaaacgaaacataaaaaagaaaagtagtgcaagaaacagaggagttagataccaaaaagtgagagatatcgaatggcggagaaagaagagagtgtgaagcttctagggttttgggcaagcccttttagtcgtcgagtcgagatggctctcaaactcaaaggcgtgccatacgaatacttggaagaagatttgcccaacaagacccctttgcttctggagctaaacccgcttcacaagaaagttccggttcttgtccacaatgacaaaatattactcgagtcacatctgattctcgaatacatcgatcagacgtggaagaacagtccaattcttcctcaagatccttacgagaaggccatggctcgattttgggccaagttcatcgatgaccaggtatactaatattgatttgcagattaattagttgattctatgcagaacaatattatattattcgcttgtttatatattgttctttacttgcagatcctaacactagggtttaggtcccttgtaaaagcagagaaaggaagagaggttgctattgaagagactcgggaactgcttatgtttcttgagaaagaagtcactggaaaagatttcttcggtggcaagacaatcggattcttggacatgatcgcaggaagtatgatcccattttgtctagctagactttggaaaggtattggaattgatatgattccagaggagaagtttccggaattaaatagatggatcaagaatttggaagaagttgaggcagtgaggggatgtattcctccaagagagaaacaaattgagcgcatgaccaaaattgcagagacaattaagtctgcctaaattaaagatacttcttgcctacgaaaatatttgatttatatgcttgcatcgttttttatttatatttttattttttaaagtttttcgaaaaatagaatgacctaatatttaagtaaaaagatcaaaaacctatttgaaagttacagcaatcaaataacgtggtgtgtctggagattgtaaaagccaagactagaaggaaataagaataaaataaccaaagtgacctcagcagtgacttggttaccttactgatgtctttttttttttttttatcttcaagataagcttgagagttgagactacaaaaaaaagcacaatattgtttttaaagtgacagagagagtcagagagagagatctaatggcgaagaaagaagagagtgtgaagcttctagggttttggataagcccttttagtcgtagagtcgagatggctctcaaacttaaaggcgtaccatacgagtacttggaagaagacttacccaaaaagagcactttacttcttgaactaaatccggttcacaagaaggttccggttcttgttcacaatgataaattattatccgagtcacatgtgatcctcgaatacatcgaccaaacttggaataacaatccaattctacctcacgatccctacgagaaggccatggttcggttctgggccaagttcgttgatgagcaggtactctagtctaactaattaaattgatttataatattgattgcaaaataaatgagaaacacttgagagttattagaagttcattacatttcaagcatttatatcaggattatttgtaggataaagtaattttctaagtacttttttttatagattggtataataacttgcagatcctaccagttggcttcatgcccctagtaaaagcagagaagggaatagatgttgctattgaggagattcgagaaatgcttatgtttcttgagaaggaagtcactggaaaagatttctttggtggcaagacgatcggattcttggacatggttgcgggaagtatgatcccgttttgtcttgctcgggcttgggaatgtttggggattgatatgactccagaggatacgtttccagaattaaacagatggatcaagaacttgaatgaagttgagatcgtgagggaatgtatacctccaaaagagaaacatattgagcgtatgaagaaaattatagagagagctaagtctacgttctaaattaatgataacttcataactctgtgttctaaaataatgactatgtgcagcttgtatcgttttgttattgaaaaatttgaaacaaagaatgaatgtagctgcattggtagtggaaatcaattaatgggtgcaaagtgaaatgttgaaagctacctattataactataataacaaatattgatttatggtttagggaaaataaattgcaaagatggtaaatctaagttcgataggatgatgagttaatttgtttcatgatgtgtggtattgattacatgatgtttgataagaagttaagaacattaacgtatggttggttagtattggtttattgtgtattgttggttagtatttcagtttagtgatattctggttctattagtctatccaattttgtattagcattggtaactcaatttcttcaagaaatgaaataacaaatatttaacatatctctccaaaactaatacatcggaagtgaaagatgaaagacatgttcaaagaatatttatcaaaaaaaaaaaaaagagagatggtcaaagttagacataaatattgacttttgaggattcttaatattttgaacacatgctgaaatgtttaggcgtgaggataaatgatgaacacatttgaaagtgacggcaatgatgaacaactaccttctagatgttcttggatgatacacatgaatgatgtacatacattgaacttgtaattaagtgttcctcacaactctaattagaaaagtatgcttaattattggagtaaatggcctaaaaaagacttttccttttcctttatgcctttataatcatgcacaatttacatgagagtatatataaagattagttaaataaaaaataaaaaagagggaaagagattgattattcaatggccgagaaagaagagggtgtgaagcttatagggtcttgggcaagcccattcagtcgtagagtcgagatggctctcaagcttaaaggcgtgccgtacgattacttggacgaagattatttggttgtcaagagcccgttgctacttcaactcaacccggtttacaaaaaagtccctgttttggttcacaatggtaaaatattacccgagtcacaactgatccttgaatacatcgaccaaacatggacaaacaatcctattctaccgcaaagtccatatgacaaagccatggctcgattctgggccaaatttgtcgatgaacaagtaattcttaagacaaattcgtttattaactcattgcagatgttatttatagaaattatgagaaacacttataactaccggtcacattgaatatatatgcacataattctagtcatgaaacgtttgctatatatcgctaccgtgtaggtcacaatgatagggctcaggtcactggtgaaatcagagaagagaattgacgttgcaatcgaagaagttcaagaactaattatgttgcttgagaatcaaatcacgggaaaaaaattattcggcggagagacgataggattcttggacatggtcgtgggaagtatgatcccgttttgtctagctcgggcttgggaaggtatgggaattgatatgattccagaagaaaagtttccagagctaaacagatggatcaagaatttgaaagaaattgagatcgtgagggaatgcattcctgatagagagaaacatattgagcacatgatgaaaattgtaggacgaatcaaagcggtctaagagacaacatgatactctttgatccagtgatgttaagttgttaactaaatttgtattgtcttgttatttaaaagttttatgaacaatctactaaataaagatgagtgtgatacatgtatccacagtggtagtataatttagtttgtacgagtatctagttctatctaattattgatatatgatcatattttctcataacatatttttgttctgtaatttagatgataaattgataaccaatttgtattattacgaagaaaaagaaaacagtttgaactattcattaaaaaaagttattgtttaaaaggtattttattagattaaaatattaaattaattgtaattcacttttggaccacgcatttagcatcacacgtataactttaacaaatcaggtaaaaccaaatttctttaattaggtaaagaaacagaagactgaaagaaaaactagtttggaaacaaaaaatggtatttgcaggaattgtaaggaatttgggatactagaaatgtatggatctaagttagaaaaaatcaacaaaaatttgttgaatattatttataaagttggtatgtttgaggaaattgaaaaagataaaatatatttgaatatatggagagatgatataatgtgttcacggttcattggatatttagcagtgaatgaatcaagagaaagcaaaatagttattttcttctttcccgtcgttttagtatacttttcaagcacgagaacggaatcacaaaaactagtcaaaaaaggcgttaaatcctatagaacaaaaacatataagctatggtttcgaacgggaaccaaaccataatatgcgatgcacttctaatagcaatcaaaaatttgttaatatgtacatatatatttttgttttattaaaaccgtatcatactttatctgcagttaaaccgcacatctttattcggagcctatatatctacactgcctatatatcaaccgaccaaacattcacgaaaacaaaccacataaactagtcaaagaagaatagatgagttacattataaaaaagttcaagtgagagaaagagaggtccaatggcggagaaagaagaggatgtgaagcttctaggtttttgggcaagcccttttactcgtagagttgagatggctttcaagctcaaaggcgtgccttacgagtacttggagcaagatatagtgaacaagagccctttgcttctccagataaatccggtttacaagaaggttccggttcttgtctacaaagggaaaatattatccgagtcacatgtgatcctcgaatacatcgaccaaatatggaagaacaatccaattcttcctcaagatccttacgagaaagccatggctttattctgggccaagttcgttgatgaacaggtaactttatcaactaattgcataggtgatttctaaaatatgactaacacctagaaccaccgatgactgtatgtaatttcattacattttgaatagtaaaatcaagattctgattctgatcgattggtaagctaggaaaggcagaattctaaaatgattctggttccataagaatgtctatgcaaaacaaaaattaattgcggttaattttctgctgaaatggttactatcttgtaggttggaccagtagcttttatgtctgtggcaaaagcagagaagggagtagaggttgcaatcaaggaggctcaagaactctttatgtttcttgagaaggaagtcactggaaaagatttcttcggtggcaaaacaattggatttttggacttggtcgcaggaagtatgatcccgttttgtcttgctcgaggttgggaaggtatgggaattgatatgattccagaggaaaagtttccagagctaaacagatggatcaaaaatttgaaagaaattgagatcgtgagagaatgtattcctcctagagaggaacaaattgagcatatgaagaaagttgtagaaagaatcaaatcagcctaagagacaacaatgatactcttcgatcagtagatgttaactatatgtttgtgtaatcttgttataatagtttgtatgaacaataaatgaaacatttgtatgaacaattagtgtttttactaaattctaatgtcaattaattattataaacattttaaatgtagtagtattcaatttcttacaaatcataagaaattggttcataaacctggagttttcatatgaaagaaaagtagataaaagctataatttagtcaaaccatccttcttaataaaaccacaactatgattaaatgtgaacatgtatttcgacacgtaagaagttgtgtaaacagaggaaagtacaacggacatgtgggtctatttgttgcggcacaatataacaaatttctttagtatatttttagtatcgtgaggtggtgagtcttgtaaccatagaaaattcaccgatactttataacattgttggaaggaaaattcagcaaacaagttcgtagatggagaaacggaaaaaccaacgcctattataacaacaacatttttaatatatgccaaaaggaacatcaaataacagattagtactaattctttttttatagctcagactatagagttgtttgttttcttgggcgtcaatataacaaacgagaatgacaaatggttttaaagctgttgatgtttcatacacagacaaaatggatcaattatgaagaaccacgataaagtgatgggtataattggggaagcagaagaaattcttgacgaagcatggggttgtcttcagaaaatgaatggatcaagtcaaggtacacatgctccagggataaggcaaggttaggaattaggacacatctccacttactaaaaaagagataaaaaaaaattataaagggaacgttataaatatgttgtaaagtcaacatctgtttccttctagactcttcgcatttacatcacactgccgaccatataaaacggcaaagttcgtcgtcgttttatcacaagaccatcaacaccataaggctataaatccaagctaaaaggtagtgattaactccacaaaaccagaaaaaactacatttctaacatatagaagaaacagagaaaaagagagagagacccctaatggctgagaaagaagaagtgaagcttttggggatatgggcgagcccttttagccgtcgggtcgagatggctctcaaactcaaaggcataccgtacgagtacgtggaagagatactggagaacaaaagccctttgcttcttgctcttaaccctattcacaagaaagtccctgttcttgtccacaatggtaaaaccattctcgagtctcatgtgattcttgaatacatcgatgagacttggccacaaaatccaattctccctcaagatccttatgaaagatccaaagctcgtttctttgctaaactcgtcgatgaacaggtaattgaattggttcaaaattgcatgtcaaataataaacaattggttctgctttgttaatttatcaaacaagtaattttctattaacattagcgattatatgtctctgtcattgtagattatgaacgtggggtttatatcaatggcaagagcagacgagaaaggaagagaagttttagccgagcaggtaagagaactgattatgtatctcgagaaagaacttgtcggaaaagattacttcggaggcaagactgtcggattcttggactttgtcgccggaagtttaattccgttttgtttggagagaggttgggaaggaataggattggaagtgattacagaggagaagtttccagagttcaagagatgggttaggaatttggagaaggttgagattgttaaagattgtgttccaccaagagaggaacatgtagaacacatgaactatatggcagagagagtgagatcttcttaagaaaacaaatcatgtttagttcttgatcatgcaatgtttgtatggttatgttgttgtttattttattgaatatctttgtatgttgtgtggttgagaagtgaggttttatcatcatctctcacgttatcttatttggtcccagccactatttagaattaatggtaaagctttggctattttgtccacgttatcttattttgttcttacttctcacgttatctcagattctcaatatggttcccagacaaatattgaatcagctacaaaagatgatagaatttgccacaatcttatctgatacattccgtcacaaattttataaggaaacttatacagctatcttttgttgtcaatcaatcacaaaatttccgcgccttaaaaagaaaaattgtaataagttttcaataaagtatcttttgtcactcattttccgtatatcgcaaaagtgttttaatttatgaaggattttttccgttgaattatgcaaatatgaggttcatttacaatatgttaatttggaataaataaattgagtgacggattaacccaaatggatattaaatatatcagtttcatgtctacctctaaaacaagagaaaagcttttacaactccgtaaatcttcatttttagtgtcaacattttaagttgatatactaaccatgatctaagtacgggtagttaagaagacaattggtttacaaaaaaaagggttaagaagacaattgaattttcatttaaaagattacgtttttggacaaactttatcaaaaaaagtacaaatcagttataagaaaacttttagaaaaaattaaagaagaaagagaaataatttgtaatccagaagagctttatcagctttataagtttttctattgacagttgtggtatttttatggaaaaacattagtaacaaatttaataatttatatgatatttttacgtatttaaattataaataatactgctaagtttgtgctaaataaaaaatataaaaaatactgctaagtgtaaaagtttaagaatgagaatttgatttggcttcggatgttgaggtcacgcatgctaaatgcgtcatgcatgtggcgttatttttgagatcctcgtatacattgatgagacttggaaacacagtcccattcttcctcaggatcccttccaaagatccaaggttgagtcttagctaaacttgttgatgaacaagtacttcctcttatttagattcgatttttgtttttaatcgtttagtatatggaagtagtcattttaatttttttttgaaaactggttatgattttgataagggagttcaattcaattttaaatcaacaaaaaataaataaaaattgacttaatttgatcattaatctatttagcatgtgttaaccagatttccaaaagctcaataatgtttgttcttaagggtgttaaggaagccttgggacctcgaactgtgcagattactattgcaagagcaatttcaactgatattgtgaaagccattgaagtttcttgttcgcttctagtgcggttgcaaggactactcgtgtactctcatatgaaagtttcggtacatttttttcttcagaaaagaggttcaaaactttgaaggttggatataaagacctcaacgactacacctatcaaaacctttgagaaaggctatgtcaacaacattttttattgcgatgaactgataatcagcaatatcaatgaatcaagaaccggatcaaaatatttgtctccaatagtttttgttatgtggttgcaatggcaaggttgatcatcctttttcaagtcaacgttgatcatcctttttcaagtcaaggttgatcatcctttttcaaatcatctttggttctctctcgagattgttattttatcttgttccaattaaagttttgatagtgaatgttagtggcaaaattttattcaaatattttataattatttttttgtagcaaatcaattttaagttaaattcgatttaaaatgattttttcaacaaatttcattaaaaaaatttatagatacaatcgcaaagttgtataaaattttatttaaaaaagaaatttttgtagaattattcaaatatgaatgtttttcattaagatgtccattcaaaataatataagaatataataattttaagtacactcttaaaacgataaaaaaaaaaaaaacaattaaaacaggattttttttatttttcttgaaaattgatgtcacgcatgctaaagatgcatgcatatgggacatgactttacttttgagagccgaaaaaaatggtgaagagctggtattgttgggttccacatcgcggtttcacattacacaattggaaacagttgaatatcccttagaacttaaaacaacccaagttaaaaacaacaacccactaagtttatataaaagtaaatattcgtaagaaaaaaccacggaactacactaaaaagaaacattaatacaaaatttagttttttttttctgtcaagtactgtttatttatttctttttctatttcagtaccacattgacatacctacaaagtatgatactcgtttttttttgtcaaaacaaattacaatattcgattattaaattaaactaatttgtgggctggtcgtagagacatcttctatcttcttgcgaatatcatgataatcaaatcttgaaaacttaatttttgtatgtatgaggaataataaaacacgttgttttatggtttaaaaaaaaaaaagctaaaaaaaaaataaagaaaataaaacacgttgttttatggtcaaaaataccaccttgtcaccacaataaacaatgtgaacaaatttatgtcggtgcgcatcatttcttctgatttcttatgatttctttccattttttatgtgttacaaaattattgttttgaacaaattttcacacctgtggtctgtagatatgatttaaatatactaaattatccaatttaattataattgtttatgcaaaaaatttgatcatccgctttctgcattagctcttcaacacattattgtgatttctgaagtagggagcatatggatatgtaattatgtaccaccaaaaaaaaaatgcgcgattgaaaaatgaatgacacatgtgacatgtgttggatcttctgataaaactccaacgctaaaatcaacaccaatgtgatttttttgacgtaaaaaggacaatgatcaaaagcgttaagatgtgattgtttatgtattttaggtcagtttttttttatattatattttactccgaattccttattgtgaagcatagaatgcttatagtttatcataacgagattcgaatacgagatcacaaatcttgttttaaaacatttgaaaattggagaaattagtggctcacacatgacggagaaagatgaaccgcatgcctcccattaccaacgtgtatggtatcaatgtcctaaagtgaaattattatattcaaatgtcataattgaacgtgattcatggcattggcatctatatttatttaaatatttaaaacctcattgcccagtggccggcaaaaaagttgataaatcgtcgtcgtttgcaaaaacgacatttaacccttgggctataaatagaaagtgagccaattcagaattctaaacaaccatctatctaagaagaagcagaaagaaagaagatctaactaatgggcaaaaatgaggaagtgaagcttttgggaatatgggcgagccctttcagccgtcggatcgagatggctctcaaactcaaaggtgtaccgtacgaatacttggaggaagatttggagaacaagagctctttgcttcttgctctaagccctattcacaagaagatccctgttcttgttcataatggtaaaaccattatcgagtcgcatgtgatcctcgaatacatcgatgagacttggaaacacaatcccattcttcctcaggatcccttccaaagatccaaggctcgagtcttagctaaacttgttgatgaaaaggtacattctcttatttagtttcgatttttatttttttaatcgtttagtacatggaagtagtcatttctaataatctcttatattttcttctctttttttttttttaatctgatcaaaccttaacatgtgttaaccagttttctacgagctcaatactttaaacagttgaagtcaacaactatatattaatcagattaacggattaatcaatgctactaatcatttttaatcctttactaaaccgttgttaattgtctctaatattctagatagtaaatgtgggatttgcctcactggccaaaacagagaaaggaagagaagttctgattgagcagacaagagaattgattatgtgtctcgaaaaagaactcgccggaaaagattacttcggcggcaagacagtcggattcttggactttgtcgccggaagtatgatcccgttttgtttggagagggcttgggaaggaatgggagtggagatgattacagagaaaaagtttccagaatataacaaatgggtgaagaagctgaaggaggttgagatcgttgttgattgtattcctctaagagagaaacatattgaacacatgaacaatatggcagagaaaattagatctgcttaattcagaagataatgcatctttcatagctttggttccatattttatttaatttactactgtaatgaaagataaatcaaggacaaaactttatgattcagaaaataattagaaaacaaatcctttgaaaaagggtaaaaaaatacgtagacaatatccagcagaatcaaattaacataatcctagatttggtccaacaaaccctagctaatccggcaatagaaggcgagttgcacctgattcgattataaaatcagcgttctttggatcggtcctaaacttcatctcatgagagccgttggtgcactggatctgaaacctaaagattttaatcccaaggtacgtctcgccaatgacgtcttctacacggctagtgaatttagtgcccttactcatgatattatcacaattgttgcattgaagtctcatcggaaggcttaagtcggcgttgcgtgctgccatagcttcagaacacaagaacacgcgagaaaaaagatatttgatctgtctttccctaagacctatatttataagaaacaatctcttcgtgatttcctttttttttggtccaataaattagggttttttctttttatattagttttgcatttataatttttatgaaaaaataagggaaaggtggaagaaaatattaaaactaatataaaagaaaaggaaaaagtctaatttgactacattcacgcttttggatataatttgactacacaaatcctaaacttaaaatatatatttatcagaatgattataaaatatcaatatttgttgatgtaaaaaccatcattacttaaaataaaaaatagaaaacaaaatatttgggggtgggagggtaaggcgaggaaacggttaaccgcagacactaatctagtttcaacagaaccacctacgaaccaaacccaacctcctggtctactttttggagacgagcctcttatgtagccatcgacgttttttcattatttttcgggggaaacgccggcctaagacccccagtaattaattcccatagttaacatgagagggttcagggtttagcaatcaataagcagactcatctcctaggttcccacaccccttaacttatttgaccaaacctttcttcatttaaacaactcaacttcaatctctatcttccgatgtgggacaaagtgctttcttactgaagcatttattgtaacttgttcgtcactggtgacgtcaccattctttcttataaataaatcataacctattaaccttagtccataaagaagaagaagctaacgaaaaataatggcggagagatcaaattcagaggaagtgaagcttttgggaatgtgggcgagtccttttagtcggaggattgagattgctcttacgcttaaaggtgtttcgtatgagttcctggagcaagatatcacaaacaagagctctttgttgcttcaattgaatccggttcataagatgattccggttcttgttcataatggtaaaccgatttctgaatcacttgtgattcttgagtatattgatgagacttggagagacaatccgattcttcctcaagatccgtatgagagaactatggctcgattctggtctaaattcgtcgatgaacaggtatgaattttcaatttcgataactggtttgggtttttgaaccgggtttttaaaaccggtttgttggggagtttcagatttatgtgacggcgatgaaagttgtggggaagaccggaaaagagagagatgctgtggttgaagcgacgagagatttgttgatgtttttggagaaagagcttgttgggaaagattttctcggtgggaaaagtttagggtttgtggatattgtggcgactttggtggcgttttggctgatgagaacggaggagatcgtcggggtaaaggtggttccggtggagaagttcccggagatacatagatgggttaagaatttgttgggtaatgatgttatcaagaaatgtattcctcctgaagatgagcatcttaagtacattagagctcgtatggagaaactcaatatcaaatctgcttgataaggttttataaaaattctaatgctcacagtatgtctcttttgttcttgtctcagttgctatgttctgtcacttaatgtttgctatattgaaacacgaaaatttgaactttctttcttgttctacctaaagatgttcttaagcaaataatacagaagaaactctcttttgtgctactctgattcaacctgaacagttgcatgataaatcccataagacttcctacagaaatttctaacaccagtaatgatctctttaggactagctccaggctctggtaagatatgacaggacaatacgattctccctactgttatctcccatacatggagatcataaacaatcttaactccatcgattcgcttaagtcctctttcgagcttctctatgtccatatcacgcggtacgcgttccatcagtattccaaatatgttcttgagaattggtagagtagcagcaagagcaaaagcagagaaaacaagagtgcaaatcaaatcaaccaaaacccattttggttttacccaaatgatacctccaccaatcataacacctagtgactgaatcatatcagccattgcgtgaagataagctccttgtatgttaatgttcatctcctttgaagacgatttctcaccttttaaaggattcatttcctcctcctcctcttctgccaccacctccttgtgatgatgttgatgttgatgtttatgattatgatgatggtgatgatggtcgtggtggtggtggctatggttatgtcctaaccaaaggaccataaccaagttcatgaaaaacccgaaagccgaaatcccaaacatgatttctccattaacctctctgcttctgctaagtagtctttgaatggcttcatggattatcactccagagacaagccatatgagctgaacagacaagaacgccgctaaaacttcaagccgtttaaacccgaacgagtttcgcggattagcttcccagctcgagaccttgatcgccaacaaagagacacacaaacccgccacatccgacaacaaatgcgcagcatctgtcataaccgcaagactattcgccttaaaacctcccacaatctgtacggacataacgatgaggtaaagaaaaataaggctgcttagtcttctagtcgattcttcgcgttctttcgtctcggaaacgcaatgttcttgtctcgtaaacgcgcaagacagaggaaccacgcctaaattttcctctgttttcgatggtgatggtgactccatttcttcctcatcatcgggtttcaaaatgcagatttgctccaattccataagctgtttatacgttacacaaactttcattagagatctaaatcaacatttgatcctctttctttaagtatttttatgattaaaagattcaaataaacccattttgtgtttcttttaagacaagaaacaaacctgagaatcagatggagaggcaaaacgtatatgaattccagagctgtcctcttcagaaatcttgagttttatcttatggttagagatatgaagacatgaacacaggcaattaaggatgatccagcaaatatgggaggagatgttttatagatgtggaattttcttttttgtatgggaatctaaaataagtcgttgtggcttgtgacgggtgaagaagaataatcttttttctttaataaggagaatcaaggaaaaaagaaataaatataaagattttgttttggtgattttgtgtttcttttggtgtgtatgagatttgtatgattgtattaccatacaaaggtggcgtttgcgtttcaggtgaacaaaatggactgactattctttgttcaaaataaggattgattcaactaatgttctttgatctttagcatgttgtttttttcgtctttttgttttctttcattatagaaatcaattataaacatacatcaatattattttaaattaggttaggaccgttaggtgatgtaatttgtccatgttgatatagtttatttttttcttttgataaaaatgttgttgatatattaacttgttttatcaaactacatagttattagttagcacttagcatgtaattaagaatgtgaattggtgatttttaacaaaagaatggtatttgcatacacgcatatgcatgttaatttgacacatcaaccagatggtgattatattagattaggtattaccgatcaaacactaaatcttggttgttttgtagtttcatggtaacaaatagattgttgttttgtagtttttgatggcaacactaagttttcagtaactaatttgctaattcaaactttttggcgttttaatttattagtcgctaattaagaatttaagaattaagattgatctaatctaccacttaattacggaaaacgaatatcatactaacatagtaacatttgattgttataattggtcactgatcattaccgatgactgctaaacaaacaacaaaacatattgttgatcactatcccccatcattactactgaatagtgaatactatattactatcgccaatcgttattactgatcgcgtagagaggctagaagaactagttttctaccgtttggaaatttgtataaaggaatcttctagaaagatagcccatttacaggcccaataaaacgtgtacatacccattaggttgatttcactcaggtctcgtaaataaattaaataaataaaaaatgaaccaatcaatattgactaatctcagagcacacaccagtcttcgggtctctcctcctcgcggctcgaaacgcaagcttcacgcttgaaaatctccgttcgttttctacctcgtttagatcggagatggcggagaagccggcgcaagagcaagagcagaagcgagcgatggaacctgcagttctcgacgatattattcgtcgtttggttgagtttcggaacacgagacctggatcggggaagcaagttcatctcagtgaaggtgaaattcgtcagctttgtgctgtctccaaagaaatatttcttcaacagcccaatctgcttgaattggaagctcccatcaagatctgcggtcagatttttgttccctttagtttagaaagagtgcttttttggattggggttttagttttgattgatttttagaagcgaatttagtgcatgtttagataaagtatcaagctttgttcagtagtaatgagttgaattcttaaagctatgtacatatctaagtgactgaagaaaaaatgtgagattttgattgtcttttgagttcagaacaatgaaatcaagctaatgggtagtataaagtttgaatttttattactaaaagtcttagataggcttaggagttttgactggttctatgaggtttgattcattttatcttaatgttgactagtcaagttatgtgttttgattgggtctgataaaacatttcctgcaaaagtttaacgttgactagtagtatctgatatgccatgttttcttagatgtaatggttatattttgtcttttactttataggtgatattcatgggcagtattcagatctattgaggctttttgagtatggagggttccctcccgaagctaattatttgttcttgggtgattatgttgaccgtggcaagcaaagcttggaaacaatatgtcttcttctagcttacaaaatcaagtaccctgagaacttcttcttgttgagagggaatcatgaatctgcttccattaatcgtatttacggtttctatgatgagtgcaaacgcaggttcaatgtcagactctggaaaatattcaccgattgctttaactgtcttcctgtggccgccttaattgatgacagaatactatgtatgcatggtgggatttccccagagctgaaaagtttggaccagattagaaatattgcacggccgatggatattccggagtctggtttggtatgtgatttactatggtcggatcctagtggagacgtaggctggggcatgaatgatcgtggtgtttcatacacttttggagctgacaaagtcgcagagttcttggagaaacatgacatggaccttatctgtcgtgcccaccaggttttaacttgagttatatctgccatttagtttattatgaaaactgtgcaaccttaatttgagtgtattggctctgtttataggttgttgaagatgggtatgagttctttgcagaaagacaacttgttacagtattttcagctcccaactattgcggggaatttgacaacgctggcgcaatgatgagcattgatgagagcttaatgtgctcattccagattctaaagccgtcagaaaagaagtcgccttttctgtgacaccgattatccagtgaccaccattgcttcaaattaacaattctacaaaaggtaaaaacttttttatgctatggtagcaccacatttgtgtaaccctgattcaacattctctgcttcatgtttagcttgttcaccgtatctagcttttactctgagtggtacatacatatcagcctcaggaaaatgaaatggaaaacatgtattcgttaagctagttataatgggtttttttgagttcctgtcacagagatgagttcaaaatcacacaatagttttcttctcttacatttctgtgtaattagctcatgttgcttataatttgtcatcaagaaacagtgttaatctttgaggtttggtcactgtatgctgaatgttcttatgtggctcagcttttgattatcattttgcattttgttaatttgctgcagttgtatactggcaagaggatctagagacggaaactgctcaattgggaccttaatggtactgataatagagcattagacatgtagctgttgacagtgatggcatcgagcagaaggaacaagtcaagtctgtactgtgattttagcatctctcacatctatgtttgtctaaaatgtgtgtgtgtttttagtcttctctctgaataatattagattctcatttgtactctctatttatttaggagaacccaaattcaaaactttttttagtctcttcaccaccataaagccataatcactacgtattgttcacttcaaaaatttaacatggggtgccaattgtcacatgtaaaactatatggtcctaaaattaaaaatatcaagtaattaaggataataatgaaacatgtgtgtgcacgtgtgatggagagaaacaaacaaatcagctttagaattcagattccttcttgtcacacagttttcgtttctctttctctttctctcacactctctgcctatctccgccgcggagatccatcgtgttttctacttctgttggtatccatggattctctcgttgaatccggttggaaggtacttcgtattcctctatctcgtcgcgttcctttgtatgcgattcctacgttttttttttttgttttgttttcagagattgaatcgtgttttttgtttctcggtctctggcgacttgagtgtactgcatttatgatacaagtgtaggtacgggattagtatctgccgtgttaggttgattttgtgtttgtcgtctgtggtccatcgtattgtattgttgtggtccctttatgttgagattgaattggtttcgtgtcgattgcgttgtggtttcagatctggatttgactgttctagttacagattattactgatttcgtatgtgatctctgtttgtgcttgtatttttttttggaatttgagtgggatttatgtattgttgttggagcttggactagcttagaggatctgtgattgtgatacgtgttgataagcaataggttttccttgaacgtcttcttaacttgcttttctgcgtgagtgactggatggatggtgtcaatgatatacaattgccttcagttttcgtggaattgaacaaattttatctccctttggcaatcatgtttagctctttagtttgacagttctagctgtgacactgacccttctttgtggcgatgatgcagtaccttgttacgcatttcagtgactttcaactggcgtgtattgggagttttatacttcatgaaagcgtgtttttcttgtctggactcccttacattttcctagaaaggactggttttctgagcaactacaaaattcaggtttgtcttttcttctcatgattcagtggtcttctaactaatagctttgtgtgtctgttcaaatataaactgaatggaaagatatcaccaagttgtcagtgttctcatttccccaatggtaatgtcaaagtgataactggtttagcttgtcttctagatttatcaagtactcttgtttggtcttttgcagaccaaaagtaatactcctgaagcccagggaaaatgcattgctcgactattactttaccattgctgcgtaaacttgcccctcatgatggcgtcgtatcctgtattcagattcatgggcatggaaagcagttttcctctgccgtcctggtattatcaggttctttagtgctgaaagctttttttgcctttgggttctgatgttaaactcttccaatgggcaatatatataaaatgtcagtgttgagctgcatgagaagaacctgcattatgtttgatctggtttatgaaactatatctggtgacgctcttgcaggaaagtggtgtctgcccagatcttattctacttcatcattgaggattttgtattctattggggtcacaggatcttgcatactaaatggctctacaagaacgtgcacagtgtgcatcatgagtaagctatcagtactcaccatcttttttgtgcttgacaatgttagttcactcatggtcctcaataaacaatcttatggtattacttatatacaggtacgcgacaccgtttggtttgacatcagaatatgctcatcccgctgaaattctgttccttggttttgctaccattgttggtccggctctcaccgggcctcacctgatcaccctttggttatggatgatgctcagagttattgagacagttgaggcacattgtggttatcatttcccatggagcccctcgaattttcttcctctatacggcgggtaagataagacttctaacctgtgattgccttgaaagagcaacaccttaaacctaacagatctttaatattaatgtgggaatcatttgcttacagtgctgacttccatgactaccatcatcgattactctacacaaagtctggcaactactcatcaacgtttgtttacatggactggtaaattattgaactctgtttcttactttaacagaagtcataactataataaacatgtaaatatgtttatctatgttacttcaggatctttggcaccgataaaggttacagaaaacttaaggccctaaaagaaacctgacaacaaacaaacgtgaaattcgattcccgagagaggtcttgttctcaaaaaaccttctttcttttgttttgtctctaccatttcctcaactttagtcataagaacatcattatttgctacaatttgggttgtacaatcaaagctgctagtctgaagtcgattcgatgttgaaatttatacgtgacctcgtttctattggacttgttgttactactgcttactgtttttcttattctttagatactgctaatactcataattgcatttagaacctatgatctactctcatgtctttgcctagcggcagagactaagtacctcttaaagtatcttaatgcctaaaagtaaaaggtatagtatagtctgacaatcttttttaaagcaaaatgcttttacatgtcgaccttcttaatttgatttgatttaagattataagcatacacgaaacaggattagggttgacaagaataattcttatcatttctattaattaaccctttttcggggtttccataaaatcgggttaattttgtatacaaccaacgtattccaagaataaccaaaaagcaaaactgatatagaaagttaaagcaaaattgtcttcctcttcgactagtgtccacttacgtgtccttatcttctgagatcaatcacaacgacactgacgttgtcactactgttccttgccaacgccagctttgttagcaatactgacgcttccgtacaagccttgtccgaaatcgccggatcctcattatcttgtcttctcccaccaccacggagacacatacgcgctacagagcaggcggtctcgtttgacacaacatcccataaaccatcactagctagtatgaggcagtcatcgtctctcctgtccgttatggttacctccggctcgcaactcacgtaaggtttcaaatagttgtctcctattgctcgtgacattgctaagactccgagaactcttggacagtcccaatatatgactcgtccaccagctccttcgattcgatccaattcgtctggccgatcaggctgtgtttcattacaaagaacacaatctccaagttaatccacaaatccaatcattgcttaaatgaaactgaacatgttttgaacggaactgaccttgtgatcggttgataaagggactggtttcccattgcggcagagaactgctctggaatcgccacaattggcgacaacgatcttatctggcgtaatgactgagacaacagcggttgatccgacggaatcacaagccggtgtttgtagatcacacttgcaatttgcagtcacgacggaatcaccccacgatacaacttccttatccatgcgtgtgaagctacgctccatcgtcgttttccattcttcttcatcttccatatctgaacttagttcttcttgcaccagcttgtgaagcctctctctacaccttgctgcaacctaaggaaaaaaaaaagatttcgtatcagctaaaactgaaaacatagaatttcggaaaacgtaagaatgcatggtaacggagtcgtacgtgggaacaaccatggccgtcatacacaccaaagtagtgttgaggaaattccgaattcttcggagaagaaaatgaaggatgaattgccaccgcatcttccatctctcttcttctaccgcacaccgaagaaacaccgtatcttggactggatacgtcgacattttggtcagagaaatcctcccgagagcttcgaggaattgaagagtatctcgtagctaaagcctcctgtttactacgcttacaattcttctcccaatcttcatgcatcaccgtttggaatctcggcctccgccgtgaatgtgccggcgttgattcataaaccgacgacggacatgcgtcggtcactacttcgtaacatatctcggccatatccggggaaaaaaaccttaaactttgatgtcttcaaatggattttgctctgtatttctgatcaagaagaacaaaactctttcttagatgtttcaagaaatgttttcttttttgatgaactctttcaagaactggtgattcctgttttggttgcttcactggttaataaaaatgctcgaaaaccattcaatttgagaaataatgtcattacacgttacttgcattctctattttatacacaaaacctgcctcttcagaaacaattttaaattctttctataaaaaaagtaatccacgtaaggcgtcagtatcgagtgcgagattcgtggtccaatcaaattgagacggcacggatgacggatcataggaagtttcctttcgcgccacgatgcttttccccgcaaggtaggttttgttttctgtatttaaataactagaggaatttcattacgttagttttcacatttgattacatgaataacctaagtttaggtataaatcagtgtttactttcaaaacctaacaagtttagtgctaataatttatgtttgtccctagacagtaaacacgttaacaaagaaaaccttaataaacttatatctgaatttttattattattgtcttgagagtccagagaatcatcggaaatataatatgtatgacttatatgacagtaatcagctatgttgtgatggcagtctgaacaattattaaacaaatttatcatcgacaaagcaatttgaattctcatcgtccaaatatccaagaaatgcgataaagttttatatacccaagaagattaaataacaagttacatatatagtttgtttttgaatttagaaaatttaaggaatattttgtttacatgtctattattatgagtccttgaatatgatatatgagtatgtttccaacgacatgtcttttagtttagttgatatatagaagaaacttgttttgtgctatgcgtgagaataataataataataaatttatatcaaatatatatatatatatatatataattatgaagataattctttctttgttttgtgttatgcgtgagaataataataataaatttatataaattaaaaaaaattatgaacataatctttactcctttagcaaaagtaatctttttaggcttttagccataaccccctaaagatagggatactagagttgaaaatcgtacggtcatcattacatgactatataatcatatatcataagtagaatatatacaataattattttatatatcaaaagtcacaatacgattggaaacgaacaaacatcaaatgtgaacacaagtaacttcttatccgataagataaaagattgagttcttcgtccaaacattagaaggcatgaacggagtgagctccctcaacataagttacatataaaacttgtatgaattaatatgcagtgaaaccactaattaatcacataaatttaagcatgaatatatgcatatatacgtgtttaaggcaaagagaagccgttaatagtgaaacctccatcaacgcaaatggtttgacctgttatataagaagctgcgggaagacatagaaatgcaacaagcgatgatacttcatttgcctctccaacacgtctcaatggtgtcacactctccaccttttcttttacatctttatcaccgaggaactgaaacattttcacataaacttcgtaagaaatagttaaaccattttttcatactataaatgaaatgtattttcttattcattgtcttacatctttagttgacggagttgtaatgaaccatggacaaacagaattagcccttatattatcactcgcccactcgcatgctaaatttctcgccagctgattcatggctcctagaatgcgtatacatttatttaagtcgcgatagaagcaaagaatcataaattgttcgagtatgcgtataattatacctttggttgctccatagattgatgtattacccaaatttacaactccagccacggaagacatgagcacaatgttccctgaaccagaggctttcaataaaggatgcgcgagttgcgagaaatggaaagttgactccagatttgtagctattataaatgagaactcttctgctgtacactcagtcgtcggctttagtacacctattcccacattgggtacctatacaaacgaagcaaacaaaattcaacatgattttggtcattgtcgatccaagctcatagacgaggaggaggagaagcttatatatatacacacacacacttacgaggatgctgagttttccttggaagagagaggaaacagtttccatgagtttctctcgctggtcacgagaagaaacatcgcaaacagaagtggtgacttgtaacccttttgcttgccattcacgtaagctttcttgaagctgagtttcgtctctggcacatgtgtgaactcttgctcccaacatggctagttcctccaccacagcttttctatttatacatcaatatgaatttatacatatcattaagcctttgatcttttcaggggttgatttgattaaacatagaaatactatcaaaagatccacataagtctatgattgagccgtattaacaaataaaacgaaagtctatacatgattgaaatcagagctcagtttcggtactgaaattatagggaagtaagtaattaaggtagaaaaattgggactgacccgaggcctttagatccaccggtaacaagagcagtcatgccttcaagactccatttaggtttgtctctcaagctttcccctctctttgccatttttggttatcagccacagagcagatatctattcatggagattcttatttgtaactcggtataggaaaaattatagaccgtttatacatattataatatcacacgtaaccatgcaagtgtgttgtaaatggggacaaaatatcggattcgacatcattattggatggttggttgtaccagtccagtcggttgagtatttaaaacttcataattttattagaactaaatacaaagttcatatttgagagtggtaaaaaatgaatgtacaatataaaaaacgaaaaggataaataataattagacatatgcttaaaccttccaatttacaggtttttttagatgtcaactgtcattataaattccaaagtatctgtgtttggatatattttgaagtcatatacaaactatttaaataataaaaaaggcacacttagccttcgtttcttcattttctatacaatcattttcatattgagatacaacaaataaaaatgtgagcacctgactttgatatatgggacaacaaacaaacatctagcgtcaaaacgaccaaattacttatggtttgtgaggaagccttagaaggcatgtatggagagataggcagctagctctatcaacattcaacacatctcgtcttaatttatcaattcatctctcccctttggtgggtgatttaggaccgcaggttataacttatcaatgtcttgagaatgtaagaacgttggtggcttcgtagtaacaaattatactataattaaaaaaaaattagtatacttgatcggttaaaacacaaagcatgcatatattgtggagagttggattacattccaaacgccaattttttttgtttgtttgtgtaattgtgtttatgtttacatatctaaacaaattgtaaatgttaaaaaaataacgtaaaatgaaaacaatcgacgtcttaaggcagaggcttgaaagagaaaccattaacagtgaaacctccatcaacacaaatggtttgacctgtaatataagaagctgcaggaagacaaagaaatgccacaagcgatgatacttcatttacttctccaacacgtcccattggtggtctactctccacttcttttctaaactcctcattactaagactctgagagattttcaattttacttaattaaaattaaaattgagaagtaacaatgtatatagcttagaactttcatatttgttgccttacttacttcggtaactaaaggagtttctatgaaccatggacacacagagttagtccttatgttgtcacttgcccactcgcacgctaagtttcttcctagctgattcatagctcctaaaatacacttacatttcgtaaaaatcagaacgtgatgcatcattaatcgtttgaatatacatacgtatagatttacctttagatactccatatatggatgcaccattgacatgtacaactccagatacggaggagatgagcacgatgctccctgaaccagaagctttcaacaaaggatgcgcgagctgcgagagatgaaaagctgactcgagattcgttgccattgtaaatgagaaatcttcggctgtatgttgtaaggtcggtttgactatacacgttcccacattgttgaccttaaatatagatccaaaccgaaaacttaagaaaacacaacataatcgtttcctatatggatcaaagcttagatatgtacttacaagtatgttgagttttccttcgaagatagtggaaacggtttccatgagcttctctcgtttatcacgagaagaaacgtcgcagacagaagtggtaacctgaaacccttttgcttgccacttacgtaagctttcttgaagctgagtttcgtctctggcacatgtgtggattcttgcccctaacgtagctagttcctcaaccacagcttctctattaattgaacacacttacattaccaagcttatctattttccaggataggtcggttaaacatcgaagtacaatcataagatccatataaatctttgttgttaaaaaaaaaagatccatttaaatctataattgaaataagagctcagattcaatattgaactagtaagaaagtaggtaatgtaggagaactggaactgacccgatgccttttgagccaccggtgacaagagcggtcatgcctacaagactccatctaggtttgtctctcaagctttcccctgtcttagccatttctgattatgaaccacagaacccaaagatcttttcttggagatctgaatgtctggtagagaaaaatccataatgaatgaatgataatgacagtgtaagaaaggccttttcatgtatttgttaggttaatcaaacaaatgggcctcgattaagggttaggcccaactacatgagatcgagacatgttcattgtttgagagcaatgtaggtttcctgaattttagttgcataggtgagagattcatcaagaatataaatgtgtaagcaaagttgggtttattttctttggttgcttggaacgcaagaaagatgacttggaaagtgatgatggaagacaaacccaatgtctttcgttccgccggtgacaagagcggtcatgccttgaagaatccatctgctctgttctactttagccattgttctggatgtttctgttcttgacttctagtttgatgacaaatgataatgggaaaatgggttagaataaatgatacgaggttaagagaatcttcaaagaagttgtggaatgatatatatcgtaattaatgactttgtggctgagacaaattagagatctcaaagtaatgataagactgaattagtttaggttaacatatttaattgggaaagtgatcatgatgagttaatgacgtaacttatgatgcgtcttccaatttaaaacaaaaggggtttagctatatattatgatgaatctttttaaagttaatgaaaatctagtaagtaatattacataatggtttcgggccgaggatattcgggctctgagccaaaactttttggtattcataaaaacaaaaataaataacataacaggtttggattcaatcaaacagatctgtttaaataatcaaaaaagttattcataatagtagtttattctggatttatttttgtttcgtctcatgtaattaattttggtttcatttcttgggtgtgaaacaagtttcgtttgatgaaacctttacaactatctcataagaaatggaaggattactcttgactgaagccctagaattataccagtttgcgcttgatgttagtttagaaaactgaaaatatccattatgtgtcccaaccaagcatgccaataacacaacccaccggtgctaaccaaaggcatggaaggaagaggtaagtcttgaattaactaagtgtgggcctaactcacacgaaaagttagttcaaaagtggagaatttccatacacttatatactagtcgacaagtttttaagtcacgatgtgtgacgaatagtattatacgcatgtggagagaatcatagaaagacactttttgtcgtcatctttgaaagttttattgagaaatattagacactgcaaacatatataaccggaaagaaccaagagttaagtttggccaactagtctgccgtcaaattggtaatataattcccaaattcatagattatggatgcggtccatccggagagtgaactcttgttcaccacgcaagcataaatatctaagaatctcttagaaacagaacatgtggacacatctaaattacatttattacatattgacgatgtatataacccgtaagtttaaattattgaaaatatgatccaaacacatgcatatgtgttttatggcatagtcttgaaggaaaaaccgttaacagtggcaccgccgtcaacgcaaatggtctgaccagtaatataagaagctgaaggaagacaaagaaatgccacaagcggtgagacttcatttgcttctccaacacgccccattggtgtcgtacgcaccgcttctttcttaaactcttcatcgaaaaactaagagattttcacacataaattaaagcccgaagtcatatttacgtattttttttgtttttcatagtacgaaggagaaatataaactttggccttacatcgttacttaaaggagttgtgatataccaaggacaaacagagttcgtccttatgttgtcgctcgcccattcgcaagctaagtttctagccagctgattcatggctcctaaaacgagttaatatatgtgtaagcatcataacccatgggaacatattgtgttaaggatgtacttatatacggtacctttggttgctccatagatggatccaacattgacatgcacgactccagcagcagaggatatgagcacgatgctccctgagccagaggcttttaacaatgggtgggcaagctgtgagagatggaaagctgactcgagatttgtagccattacaaaagagaaatcttctgctgtatactctgtggtcggcttgaatattgacgttcccacattgttgacctacatatgtatagatccacaacaaaaaacacaacataattgggttcttgtggatcccaataccgaggaggacgaagcttatatatgtatacttacgaggatgttgagttttccttggtagagagaggaaacagtttccatgagtttcactcgttggtcacgagaagagacgtcgcagacagaagtggtgacctgaaacccttttgcttgccattcacgtaagcgttcttgaagctgagtttcgtctctggcacacgtgtggacttttgctcccaacatggctagttcctccaccacagcttccctattcatgacacacacaaacagagttagttcttccataactaaacatgacaatacaataaaagagcatagaaaatgggagtcaagattcacaatggggactgacccgatgcctttagagccaccagtgacaagagcggtcatgcctccaagactccatcttgagttctctcccaagcccccttcctttgccattccttgttaaatatcaacctacgacgattcttttcttcaaccaagatcacagatcttatatagaattgatcaagactagttgtgatagttttgaactttgaaacctcgctcaattcaaaattccacattatgataatgactgctcgaccacacatatccgtgagaggggtagacgtagtacgaaaatactacttttccttttgacaagtcttgtatagtaaagaaagtctttatgaattaataatgaagaccccttagttaatagagcaccacatattggtctaccatttacgtgtcatgagcgtagttaaaatttatataattaaaactaatttatattagcataaaactttagatctacatgtatcaatttaaccacttaaacccctggtaaattgtgttaagccacaaacggttgtgggaatttctatgcatacacaaccattgacaaaaaaccaataattaagtggccatcggtctcacaggccacacagccctttgtctatcacatctggagataaacgaataatgttctccataatagccaaaggatccctccaacaaccatctttaagaatattgatcgagagatccggaacaccatctctggtagacgatacaagaacagatggaggaagctgatgcttctttggattcgatagctcggattctttccatctctttttaaatgcattgtaatcttgtttctttttctttttcttttttttttttttttttttttttttctaagattgctctacttttaggtaatattttgtaatatataccttctatttcatttcataatgatattacaagttagtaaaaaaaattgacaacaaacatttcatttcatgcatgaccattgttgtcaatttgtgtggccagtaaaaaaaacaaacaaacaaaacatatgtcaattaaagatgtgactttttcgaatatacatatattctagaagatgcattttcaaaaacctttcttaatttttttattatttgttaactaatatgaacaaaaatcaatataactccaacaatactctatattttgtattcaaactcaataacaaccataaacgtcgtatcagctactaaacccagcaaaaatatggattattatctagttatacttatatataggattaaggtagatggcattttactagccacaatgtctaaatatttgatggagacattaagcagccataagaaacaacagaacaactaaacgtgctagtcattagctctcttgataagtgacattgaagagtttgatcataatttccaaccgcgttagtgagggtccatcctttaacactaattccatcaaaacatcaatcatggcagtaacatccatatataatcaagtgcatgtatggtgtaccagcttcattatgctgtcaactggatttttagaatgaccgtaacacatcatatatgtattagagagaaaataatatcaaatgcatggaaatttaaataaatatggctgacatgttattgcaaatgtaagttattgcaaacgaattgacatctactatctccaccagttacaagagaatttttaccatgaaagactctttatctttgatcaatttttacttttacctgtgactagcaatgaccagagatgccacatgacatatatagagtcaaagtagatcaaacaagataaatacgtttctatgtgtagtaaagaattgatgaactaagaaaaaatagtaatggttctgagttattttgatatatttgttgaacttcaaaaagaaaaaaaaatcaggatacacaaattaaaacagagtattaacattatttaaatacaagatcgaaatagaacattttcatgtatgagagatagattgggagaatatccataatggaattgtgatattgtatatgattttgttcatatactcatagtgtgagagatttgatttaagagaacactgagaattcatgacaaacaaacagaacgcgacatgaccattctcaagcctgtggctgataggtgaagccattaacagttagacctccatcaatacaaatggtttgaccatttgaccagtaatatatgaagctgcagggagacacaagaagaccactagtgatgaaacttcattcggctctccaacgcgacgaagtgaagttctactcaacaatgcctccttgaaaccaatgtcaaaaaaaaaaaaaaattggtatttgggtggtagagtttaaactgtagtggaaatgctatgcagtcgtataaacatttatatgaatccggtatgggcacaccacagcatttattaattaatagtatgtcataaaatggtatatcaatgtatcatgtagttggtcacaaaaggttttctcgttgccatccattgaattttgggtttatctctctgtgattgctttattttgagtctctattatatatatgctagttttgaaattcacttttgttattttgggttcaactatgaggtcccaacttttctaagtctaccggtttacaacaaaacagagcataaaaacagagtcttcttttcacttagtaagttagtagtaaacacaagatggaatagaacattttcatgtatgagagatacattgtaagtatatccataatgtaattatgatatatttatttttttattcatatactcatagtttgaaatattttatttgagagaacactgaaaattctagacaaacaaaaagaacgagacatgaccatactcaaacctctggctgataggagaagccattaacggtgagacctccatcaacacaaatagtctgaccagtaatataagaagctgcaggtagacacaagaaggccactagtgatgcaacttcatttggctctccaacacgaccaagtggagtcctactcaacaatgccttcttgaaactgacgtcctcaagatacttgcagaaacacaattaagagagggttagattaattcacataaaatcgttgttacattcacataaaaaaagaaaagaaaaagttgttagtttattacagattgagacagaggagtattgatgacattaggcgcaacagcgttggctcttatgccgtcttttgcccattcacatgccaaatttttagctagctgaatcaaagctcctggataataaatcaacaaaacatagaacataaaagatttattagtcagtcttgcaatgaacactatccatctactaaaaactctgtctctggctaccttttgttagaccataaatggatccagcgtcaaaagatataacccctgcaatagaggaaacaaagatgatgcttccatagcctgaagcctttaggagaggatgtgaaagctggctaaaatggtaagcagcttccacgtttgatgatatatgaaaagcgaaatcgtcttcggtatattctgttgttggctttgagcggattacgcccacattgcttacctatgcatgttgaaaaaattggtctttaaaagatttcccccacgaatatgattaacttgatagtatctttaaattaatttacttacaagaatgttgagtttgccatcgaactgcgaggagacggtttgcatcagttcttctctctcgggacgagaggctacatcacaaactgagccacttacttgaaaacctttcttttcccattcgcttaaactttgattgagcttagcttcagagatgtcacatacatggattctagctccaaaaccagccaactcttctactatggcataactaaaacattccagaaacataaactacttcaaatcttaatgttcaaacagattcagaccaatgggtaaaatagatgacatagagagaacagagaagaaagacgaacccgattccactggctccaccggtcacaagagcagtcatacctttgagactccatcttttgtccattttgcttgtaagttactttcaatgaccagaaatgctacattatatatacacacctagtgagtattagataagtgtcaattttcttaccataaaaataaaagataagggtcaattaatgagtatgtttgtatgtgtggtggatatattagccataataaataacatgacaaaatatacaagtcagtggtcaagagcaaatatgacttttaatagtcaaaatcttgatctaaacttactcatttttgtttctttcttttccattaatttcattcaaaagatgacaactgaaacgacaagtcagttagactggtgaacaaaatttttgtaaaacattcaacgtgttagttaggtaacaagaaggcaaatgttttttttttcataatttgggtagttatcttcaactaagatttccaaattttttttctaattaggtttttacaaaatatctaaagtttacccattgtattactttaaaataccgtttgttcatttctattgacagagtttttgctgaatatttgacacatttgggaagatgtaattatactcttttaatttctaattattatagtatcttgtaatgacttgttctttccctcctttcgctttttagttaagaagtaaatgccatttaagtatttcaagcatagatacaattgaaattgctaatggcaagggaagaagaaaataactgtgtctactccatctcaatgatatcaatcctcatagtattatgatccacgtaattatattcgttatgagaagcgttgtcatggagaatgcatgcataatacggaactggtaaatagatattccattattgaaaaattgtgtctactccacaactcacatatctatggatttagattatggagatactgaccatatgaccatactccacaacacacaagacaagacaagacatggctcaagcctatggctgatatgagaagccattaacagtgagacctccatcaacacaaatggtctgaccagtaatatatgaagcagcaggtagacacagaaaagccacaagtgaggcaacctctcttggttctccagcgcgaccaagtggagttctactcgacaaaatctcgttaaaaccagcgtcttcgagaaactgaatgtttacaagattgtaaaaaacaagaataagagtgggtgatgatgttaattttaaaaggaaaaaaaagaaaaaaaagagagggtgtattggttacaggtttagccagagcagtggtgataaaattaggcgcaaccgcgttggctcgaatgccgtcttttgcccattcacacgccaaatttcgtgctagctgattcaaagctcctgaacatatacacaaacaagaaaaaataatactatgactatgagagacatctattaggattcccaaagaaagatagaccaatttagaaatagaaacgaatgatactagggcaatcaattagccgttagaatcagctttcggagacataatgcgatatttatgaaccatctaaataaaaataaaaagatttattatccataaataacatgcatagttataaattagttttgtttttgtatgttattgaatatgaatgccctatatttgaccttctgaattatatatttctgaaaccaaaaatgttagcatagcacactaaaataagatttcacgcacaaaaaaaaaaaaaaaacaattcttctcaaatatcatttgaaattattaaatgggattgaaaattatcctaatcaaatatataatatacataatgaaacatatataaatccacaatactatttggtcattcttgcaatgaacttcctctagtattaaacttttcactatggttacctttcgttagaccataaatggatgcagcatcaaatgatacgatccctgcagcagaggaaataaaagtaataattccgttgcctgaagcctttaggagtggatgtgaaagttggcttagatgataagcagattccaagtttgttgaaataaggaacgaaaaatcttctgcctcatattctattgttggctttgtgcgaattgtgccaacattgttcacctatattgaacagaaaagagtatatattcatgtcatttctaaatagcttaaagatatgcttagtttctttaaattaagattaacttacaagaatgttaagcttgccatcaaatattgtggtgacagtttgcataagtgtttctctttcgagacgattggatgcatcgcagactgaaccactcacttgaaaccctttcttctcccattcggataaactttgattgagcagagttttcgatatgtcacacacatggattttggccccaaaaccggcgagttcttctactatagcatgactaaacattcgataaacataataaaactccttaaaactttaacaatttagaatgaattttagaaacagaacaatgggtaaaagagttgatatagtgagaatctagacgaacccgattccgctggctccaccggtcacaagagcagtcaaaccttggagactccaccttttatccatagtccttgtatgtcaattttcactgaccagaaatgctacacattatatatatatatccaatgaatgagtattagataagtgtcaatttttagccataataaagagatgacaaaaatatacttagtggtcaagagcaaatattaattttaatagtcaaaatcttgaccaaaacttaccattttgtatttttttcattaacttcactcgcaaattaaaagactactgaaagactactgttcacgtgtttaggtagtaagaatttgaagcgttaataataatacttaattgagacaagagggatgtagacaaattaaagtaagaagcttatgtaggatgagagacaatgagattaatctattttaagtgtggaagattatctctaatattattcgaagaaaagtacaatgaaaaaacgatccatcaattttgaaattaaagtatttacttgaattgtcattcaaagacaaatataaaatgctcattaagcgtgatagagttaactactctaaccaattatataatatttttttgtttgtttgttatcgattagtcgttcaagattcaaattcgcctattatgaattcaagactcaagatcacgcaagcccatatgtatctatcaacttgattcaagattttttttttttttttttttttttgacagccttttgattcaagactcaaaaggtataattatgtgtgtgagggccttgctcgcaaattattcacaaaatggattaatctaatagcgaaagaataaaataattcacaagataaaacacgacaaggtcatttttgtcgtgtagtatcaaaaatcacaagatataaaatacaaagtttaagacaaacagataaaacacgacagacacggaagaacaacaataaacaagtataatcagcaaaatagacggaacaacaacaacaaaaatatgtacaatataatcatcttgtgttacaattaacatttaaaatcagagacatatagactgtaatctatcctatcaatgctacaattctcaaaaaatagtataacatttcatttatgagagagaatgagagatcacattggtgtgagttgttggcgtagcgggtgtaaccgaatcttgtatatgtgcgagattagtatctccaatatggaattgcaaactcattgatgtttacgtttataaactcatagaatgagaacttttattagatatagaactttgagagcgacaagactatttctcaagcatgtggttgataggagaaaccgttaaccgtgagacctccatcaacacaaatggtttgacctgtgatataagaagctgcaggtagacacaagaagaccactagtgatgaaacttcattcggctctccaacacggccaagtggagttctactcaacaatccctcctttttactgacgtcttcaagaaacttttaacacaaaaattgagagataattagagaaattgatgtcgttaaatccacaaaaataaaaagatgtaaaagttatttttattttaccgattgagactgagcagtcttgacaacattaggtgcaacagcattggctcttatgccgtcttttgcccattcacatgccaagtttctagctaattgatttagagctcctataaaagaagtcaacaaaacactacaaaataaggaagcagaaaactctttgttttgttttttttggtaaaaaactctttgttgattagtcagatttggagtaatttaccttttgttagaccataaatggatccacagtcaattagtgatacaaccccagcaacagaggaaaggaatacaatgcttccatagcctgaagcctttaagagaggatgtgaaagttgacaaaaatggtaagcagcttccaagttagttgatatatgaaaagtgaaatcgtctgccacatattctgttgttggctttccgcgaagtacccccacgttatttacctatgttgaacaaaaattctctcttaagttatctttttgttttgtagagtttgcttagttgtttctatataaagatcattcacttacaagaatgttgagtttgccatcgaaaatcgaggagacggtttgcatcagtttttctctctcaggatgagaggttacatcacatactgaaccactcacttgaaaccctttattttcccattcgcttaaactttgattgagcaaagttttggatatgtcacatatgtggattttagctccaaaaccagctaactcttctactatggcataactaaaacattccacaaatatgaattccatgtaatcttgaccattcaggttgttatatcgaagcagaacataaacttaagagaatagagaagaactacgaacccgattccgctggctgcaccggtcacaagagcagtcataccttgaagactccataatcttttgtccatttttctagtgaccatataccagaaatgccacaaactatatatacaatgaatatggatcagataagtgtggagtatgtttttgtatgtgtggtggaaatattatgtagccgtaagagagaacattacaaaaatatctaagttagtggccccggcaaaaatgacattttgtagtcaaaacctttggccaaaactttcttatggctagataacaactttttagtgtcttccaaaagtagaagtctgataataacaaaggcctaaaccctattgcttatccaccttgaacaaagtaaactaactatgaactcttcatcactaatgaccttagaagataactcttctacgactctctactactatactacttcccccaatactcattcttttctctttatctcattttttccttgcttccttccctatatgaagcttattataatggcaagcaaataggaaaatgtttctctcatacttttcgtgtgacaaatagtgatgtaagagatgatggatcttgacttaatttgtaatgatatctttagtgaaacagacaataaaggaaagaactatcaagcttttgcgttcacctttgaattatatatataaagatggtttgtgacatttctccaattatttcatagggattttaaagcatgttgtgatctgcttttggcttactctttgttatcagaaacatcttcttgttcaaatacttaaagccagcttaacccattgtatgcttagtttctttaaattatgatttacataaaagaatgttgagcttgccacacatataatttaggcgatttgcatgtgtttctctctcgtgacaaagatatgaaccacataccgaaccacaattaaaatccaatcccacaaaagttgattgagcatagttttgcataagacatttagacaaaacacaacaaggccattatcaagcctgtggcttataagagaaggcattaacagtgaaaccaccatcaatacaaatggtttgaccagtaatataagaagctgctggtagacacaagaagaccactagtgatgcaacttcattcggctctccagcgcgaccaagtggagttctactgaacaatgcctccttgaaaccgacgtcctcgagatacttcaagaacacacaattgagaattaattagaggaatataattgagattgttacattcacataaaaaataaaaactaaaatgtaaatgttgactttttttatattacagattgagacaaaggagtcttgacaacattaggtgcaacagcattggctcttatgccgtcttttgcccattcacatgctaaatttctagttaactggttcaaagctcctgtaaaataaatcaacagaaaaaagcaatttaaaaaaaaaacatatttgattagtcagtcttgcaatgaactacctctagtagcaactttggttacctttagttagactataaatggatccacattgaactgatacaacccctgtagcagaggacataaagacgatgcttccaaatcctgaagcctttaaaagaagatgtgaaagctggctaaaatggaaagctggttccaaatttgttgagatgtggtaagagaaatcctctgccacatattctgttgttggctttccacgtattacaccaacattgtttacctacatatgattaggcatttccataagatttatgttaagaagctctctttaaacaactatgcttggcttttcgccttttcctataagatcatttacttacaagaatgttgagtttgccatcaaacagcgaggagacggtttgcatcagtttttctctatcgggccgagaagctacatcacagattgaaccactcacttgaaaccctttcttttcccattcacttaaactttgactgagaagagtttcagagatgtcacatatatggattatagctccaaaacttgctaactcctctactatggcatacctacactacacaaaaattcctttaagtcttgacaatttagaaatacaagaagaacaatgagccaaaaacatgatatagagaacagagaattaagacgaacccgattccactggctgcaccggttacaagagcagtcataccttgtagactccatctcttatccattttgcttgagactaaatgaccagaaatgccataagattatatacaatgaatgtggatcagataagtgtgaattattgagtttgttttttatgtgtggtggaaacattatgtagtagcagtaggacttataacagagaacatgactaaaatatctaagttggtggttcctcaagaaaataacttgttgttgtcaaaatctttgaccaatactttcttatttttctttttcaataacttcactcacaaaagaaaactgaaattataagttagaatggtgaacaaaatttggtacacttgctaatttagataacaaaaggacatttttattgattggtcttgttctcatgatggacttcggagtggtccattgaacttagaggactcattcttgtgagtatgattctatgactaacgctatttagtgttatctttgattccatctagtacttatgacattaatccatatatagacacataagttgcaataattagagaaggatagtttaaccaaacaaataaaatagtactagtttaattgatccttcatatagataagtccctcatttctcttacaagactaaagagcaacaatttgacattgtgtgtttttgtacaagggacataaactcatagcgtgatgagagattttattagggagagaatatttaaacagacaagaaacgacaagaccattttcaagcctgtggttgagaggagaaaccgtaaaccgtgaggcctccatcaatacaaatggtttgacctgtgatataagaagctgcaggaagacacaagaagaccactagtgatgctacttcattcggctctccagaccgaccaagtggagttctactaaacaatccctcctttttactgacgtcttgaagaaacttttaagaaacaaaaatttagagataataagaggaattgaggttgttaaattcacaacaacaacaccaaaacgtaaaaaaaaaattaaaatttatttcttacgaattgagactgagcagtcttgacaacattaggtgcaaccgcattggctcttatgccgtcttttgcccattcacatgccaaatttctagctagctgatttagagctcctacaaaagaagtcaacaaaccactaaaaaataaggaagtgaaaaactctttgttgattagtcagatttgtagtaattgtggttaccttttgttagaccataaagtgatccacagtcagttattgacacaaccccagaaacagaggaaaggaacacgatgcttccatagcctgaagtctttaagagaggatgtgaaagttggcaaaaatggtaagcagcttccaagtttgttgagatatgaaaagtgaaatcgtctgccacatattctgttgttggctttgcgcgaagtacgcccacattgtttacctatgttgaacaaaaagaagatttctctttagaaaattttgctaaaagaaatgcttagttgtttctatataaagatcatttacttacaagaatgtttagtttgccatcgaaaagcgaagagacggtttgcatcagtttttctctctcgggacgagaggttacatcacagactgaaccactcacttgaaaccctttcttttcccattctcttaagctttgattaagcagagtttcggatatgtcgcatacatggattctagctccaaaaccagctaactcctctactatggcataactaaaacattccacagacatagattaaattccttgaaacataagcagaacaatgattcaaaagatgatatagagaacagaaaaaaacaaacccgataccgctggctgcaccggttacaagagcagtcattccttgtagactccatcttttatccatttttcttgcttgttactagcagtgaccagaaatgccacaaattatgtatacagtaaatgtggatcagaatccagataagtatgaattaatgagtttgttgtcttgtttgtacgtggcatgttgagaaactatgtagtcgtatgttagaaaacatgactaaaatatcgaagtgtcccaagcaaaaaatgacatatagtcaaaatcttcaacagtgaagccatctgtccttttgagtcatcattgcatgattctgtctttgtgcttgatcaactgagcattgtaagttgatgagtgtcgaagcccatcttctcatttgagttcaacttgtgttctgtttctgcaaggctcgtgtactcttaaaagaaacatcttctgttaaggtttcttgttcattacgttttacaatatgtcaacataccaaaatgaatttagttttaaggcttaacctaaatattcaaatcattcattttccgatgttattgtttggtttactgttttcattggacaatacacacaacacagacctagctcaagcatgtggctgataggagaagccattaacagtgagacctccatcaacacaaatgacttgaccagtaatataagaagctgcaggaagacaaagaaatgccacaagcggtgagacttcatttgcctctcccacacgccccatgggtgtcctttcctctgcttcttttttcatctcctcaacactgagaagctgagggattttcaaataagttaaaaagttagaatcaaaagttattttttatttttttttcgccgttgttctaaggaaattgtccttacatcactaatcaaaggagttgtgattaaccatggacaaatagcgttagtccttatgttgtcgcttgcccattcgcaagctaagtttctagccaactgattcatggctcctgaaaaaaaatgcttttatatacacttgcatataaatcataatgtaaagaaatattgttttaaagagtatatacagtaccttttgttgctccatagatggatccaacaccgacatgcacgactccggcaatagaggacatgagcacaatgctccctgagccagaggctttcaacaaagggtgcgcaagctgtgaaatatggaaagctgagtcgagatttgtagccataagaaacgagaattcttctgctgtatactctgtggtcggcttgagcattaacgttcccacattgttcacctatatataagatatgtatagaccaacaactaaaaacatctttacaaaaaaaaaaaaagtaattaaaaacacaacatggtttggttcttgtaaatcccaagcccggggaggagaagctaatatgtatacacttacgaggatgttgagttttccttggaagagagaggaaacggtttccatgagtttctctcgttgctcacgcaaagaaacgtcgcagatagaagtggtgacctgaaaccctttttcttgccattcacgtaaacgttcttgaagctgagtctcgtctctagcacatgtgtggactcttgctcccaaaattgacagttcctccacaacagcttccctgttcatgacacgcacacacacacaaacatagtcagttcttccataactaaatatcacaatgcaataaaagagcatctaaaatggagactgacccgatgcctttagtgccaccggtcacaagagcattcataccttgaagactccatcttttatccattttttcttgtatcttacttgaagtgaccagaaatgccacagattttgtatatacaatgaatgtggaacggataagtatgaatctagtgattatctttgtatgtgtggtggaaataatacgtagccttacgagtgaagatgaaaaaaatctaagatagtggtcctaaccaaaattgacattttatagtcaaaatatttgagcaaaacttgctcattgtcatttccattaacttcactcacaaacgtcttacaagaatgttgagcttgccctcaaacaacgaggagacagtttgcagagtgtttctctctccggacgagaggatacatcacagattgtaccactcacttgaaatcctttcttttcccattcgcttaaactttgattgagcagtgtttcagatatgtcggatacatggactttggcccaaaaccagctagctcctctactatggcatgcctaaaacattccacaaacataaactccttgaattcttgaccattttggatatcaaatagaagtagaaaaatggggtaagaagacaaacccaattcctcccgctccaccggtcagaagagcagtcataccttgaagactccatcggctgttatccatctttatctatcacataactaacaagagcttctttaaattgtatataaagatagattactaacaactttgtaaataagaaaagatacaattacatgatagacattgggcaactcctgatagttacatctagggctgtccatcttacctaaactagtgggcgtttgggaccgtggacaatgattttagctatcaaaattatccgaacatatattatattggaatacttactcaaaacccaaatactcaaaacccaaaacccactatttcatgtctcattactctaaatggaaacccttagtgacatctgcatactttgatggaccctcatttgacacccatgctgaggaaaaaaatctctcaacatcaattctgaccacttgtcttatcttgagtttatttcaaacccagctagctagttcttccactatgtggtatgtcagtatatgaccacttgtaggatttggaccaaagttcttttataaattactagagaatacccatggatattgaattttgggatttcaaaccaaattagacactccatcacatgttgagacaccaaatgataccattaggcgttggccaaagtagataatgaattcagatattgaactctcgttcaccacaagcataaatatttcaggaaacaaaacatagagaataacaagaagaagaagggggacccaatccctttggcatcacaagcgactttagataggaacttatctaaagtacatttcttaattattacgcaggaaaatataatccaaacacatgcatatatgtattttaaggcagagtcttgaaggaaaaaacgttgacaatggcacctccaacacgacccatcggtggcctactctccaccttttcttttgcatctttatcattgagaaactgaaacatttcatacaaatcaaaattgggaagttatgatatagatatattttcataataataaggagactttttacttttcgccgtacattattagttaaaggagttttaatgaaccaaggacaaacagagcgcccttatgttgtcactcgcccatttgcaagctaagtttctagccagttgattcatggctcctgaaacgcatctatatgttacgaaagcatcataacgcaagggaacattgttttaaggatgtagacatatatacggtagcttcggttgctccatagatggatccgactctcagatggacaaccccatcaacagaggacgtaaggacaatgctccctgaacctgaagctttcaacaaaggattggcgagctgtgagagatggaaagctgactccagatttgtagccatcagcaacgagaaatcttctactgcatattttgtggtcggtttggctatacactttcctgcattgcttacctgtatatatacatcgaaccaaaaacattattaaacacagagacaaagcgatattaaccaaaagcagagcttaatgtgctgtaaatacaagggcagaagaagagtgacccgagacacaggtggcggtaattcattaaaggttcctcgtttattctatgcagcttctctcttcctcaaccattgtttgttggatatgagtgcaggttcaagacacaatgaaagccaaaaccgagaaaggatgacacagaatacaagctaatgaatactaactcaagaaacataaagtttttgttttcataaaagtcataacatgaaaaggttcctcagcaattttcccccacatgcacaatcaagataatcagtaaaagacaagggaaactgaatcacgctgtctgatgctaaattatccttttcattaacagtagacttagtagcacaacttcaattctcatctcatatcgatgaactgtctttcacgggagaaaggagacatgctaaagataaaacaaaaaggatcccaaggaaactagtaaaacaatagagtggcctaatcatgtcgtgggaagaaaccgtttattgacattccaccatcaacacaaagaatctgccctgtaatatatgatgatgcaggtaggcataaaaaagccactgcagaagacacctctctcggttcgccaagtcgaccaagaggagttactgagtagacttcttctaggtactctttgttgctaaggacctgagaccaaaagacgagaaccattaaacaaccccatcttaaacaaggaacacacaaattagcttagtctttctcattttgattttcagcctcaagagcttatatttaaccgcataatagataataaggcttttaaacccatacttgctccaccatagatgttttgatataccacggggcaacagcattgatccttatattgtctttggcccactcgcaagccagacttctcgtaagttgattaattgctcctaaaacacaaaggccaacgaaaagaaccaaagtttatccatcgcctgctcgttaaagaatctaatacatcttggtaaaacctgaataaatgaatgaatgctgcataagaacaaatacctacctttggttgaagattggaccgacatattcttgagggaaacaaaaccagaaacagaagagatgaacacaacacttccagctttagattctctaagcaatggataagcaagttgacataaatggaaaaccgattcgaaattcgtagacatcagagtcgaaaattctccagcagtaaactctaccattggtttcctaatgttcgtcccaacattgtttacctaaaagcatcataattacacaagaaagtaaagttatttatttacaattgttctcacagacaaattaacaaacactttatgtgcattatctctaagcaatggcattaaaccttacaaggatatgaagcttcccttcaaacacagatgacacggtctccatcaaagcctctctctgagatcgatcagagacatcgcaaacggatccagcaactcgaaaaccagaacggttccaatcactcaaacaattctccagctcgtactcattccgagcgcaagtgtgaacttctgctccaagaccagccaattcctccacaatcgcacgcctgagaatttaaacagtaacacacactactctgagaatttgcgtttgataaaggttcacacttgttgtgaagagagacaaacccaattccacgagtgccgccggtgacaagagcagacattccattgagagaccatctttccttggaggtaatggcaatggaactctgtgatgcgtaagggacgaagacggaagaggaagaggatttgtgtttagggtttatgcgtttgaaagagaggcataaatgaggtttaagggaagaagaagaagaaataaagtgaaggttttgaggtggatttgtgtacaagtgagaagccatgtcaagcaccatttatgcagagcagagtttatgtttcagcttttcaaatgagtcagagtcacctttatgcgaagcatggttctgattggtttagtgacgatgacgacgtcatcattgcggcaaattttaaattactgtatatatatcttataaactttataaaatatccataaattattagacacatttataaactgtaacaaaaaaaaaatcataatcaatttctttatttaaaaaataaaataaagcatttcaatattttagtagggaagatattagttaatatcattagaaaaaatagaaaaaaaaaggagaaaatgcaacaagaagaagagaaaaaaaaaaaactctaattcattaatttttgcggattaactggatcgttgcagttttttgctttatttcgataaatgaacaacaaaaacaaaagtccataaaaaacttagtagatgcataaactaaccatagagaagtcgataaatgtgatgctctattaatacatgcgagtacggagtatctattgaagaggtacaatactacaattaaatcacaaagtttaccttagaccaaaaagaaaaaaacatatagattagtaatatatagattgttaatataatattgtatgttggtgacaaaataaattgcctaagttttggttagaaaatagaaatactttaaccaatataagcagattacctaagatcatttttgtaaaatggaaactaattattttatgttttgagaattcttcgttcgtaaacaatctttgtactcttctcagaaagttgatatatttttaaaaattctttgactctaatctaatgatgttaatttgtacattgtattgttgtgatttcttcgtttatagaatatatggaactctatctgactacatctacatatacaattttgcatgaaaacttctctagattttgtaattatttatttttgtacaagttttcagtgagaacaagactaagatttgaatggtcaagtattcttcttcttcgtttacaaattgaatttcttagtttgacaacgtatgtctttataataataataaaaaaaagttaggatatttttttattataaatattcatatttaaagttaacactttaatttcaaggaatgttcaattgttcatccattttttatttttatattggatatatagtggctaaaagcctaacatagcaacgccttttatgcgacatatagttgataattattgcaagtttcctccacaatttcttcctaatacaaataattgcacaattacaagactcaagagaaacctttctatttgtttgtatcacatagtcatagtggataaacgtcgatcgttaggcagtcaaaattatatgtgtaacaaaaaaaaaggtgattcaccctaaaggctagctaaaagatgacgttttttttgttcaataatttttgatccattatgactttgtaatcacatttaaattatacagaaaatatgtaaccattttcttgtttattttgcaatcaattttattaggaagaaattgtggaggaaagttcgaaagaatttttcaaggatactaatataaaggtttgcaaaaaaaaaaagggtttgtttagcagtttatatagaaagtcaaatcttcaactaagtttgtttaacttgtcagcataaacaaaaaatttgaatatgaatgtgtcttgagctctttgaagctataaaaagatagcattgaacatagctaacatcaaaatctgaaaactatcaatggctaatacctataaatcgatagctgtatcaataatcttcctactatacttttcttgtgtctcaagtcaacaacaaaccaaatttcttaaccatggctttctggaagctaatctcctcaagtctggctcgtccaagatccacccgagtggccacttggagttgacaaacacttcgatgaggcaaataggtcaagcttttcatggctttcccataccattcttaaaccccaactcctcaaatttggtatctttccccacaagcttcgtctttgccatcactccaggacctggcgcaccaggccacggcttagcttttgtcatttcaccctcgctggactttagcggggccttaccaagcaattatctaggcctattcaatacctccaacaatggaaactccttgaattgcattcttgcagttgaattcgacactgtgcaggccgttgagttgaacgatattgatgataaccatgttggtatagacctcaacggagtgatctccattgagtctacctccgctgaatattttgatgaccgagaggcaaagaacataagtttgaggctggcgagtgggaaaccaataagagtctggatcgaatacaacgcaactgagacgatgctcaatgtcacattggctcctctagatcgtccgaagccaaagttgcctcttctctctagaaaactaaatctttctgggatcatctctgaagaaaattatgttggattctctgcagccacgggaactgtcacgagctcacattttgtgctaggctggagcttcagcatcgaggggaaagcatcagactttgatatcacgaagcttccctctcttccagacccgctacctccattgtctccatccccgagtcctccggtttcagtcatgaaaaattcgagtaacacgatgctgatcataatcattgctgcatcagcaatatttggaatcttgatcttaagcttcttagcggtttgcttttttcgtagaacggaaaacttcaccggaggcgcacggaaattctcccaccagacgatttccagcgcgacgggaggttttgacaactctaagcttttgggagagggaaactctgggagtttttataaagggcaacttgctcctacagagataattgccgtaaagagaattacttgcaacacaaggcaagaaaagacagccctaatagccgagatcgatgcaatctccaaggtaaaacaaagaaatcttgttgatctacatggttactgcagcaaaggaaacgagatctatcttgtttacgagtatgttatcaatagaagcctagaccggttcttgttcagcaacgacctaccagttctcaaatgggtacaccggttttgtattataaagggtattgcgtcagcacttcaacatcttcacgctgaggttcaaaaacctctcatacacggaaatgtcaaagcaagtaacgttcttttggacggagagctaaacgctcgactaggagactatggacatggaagcagacacagcactacgggacacgttgcaccagaactagtcaacacgggaaaggctacatgtgccacagatgtgtttgaatttggagtgttaatcatggagattgtttgtggaaggagagccatagagccgacaaaggaaccggtagagatcagtttagtgaactgggtgcttcgaggggtcaagagcggaaatctcttaaggagatgcgacaaaagaatcaagaaaaagaatttagtctctgaagaagtgttattggttctgaaaacaggacttctctgcgtgagacgatctccagaagataggccaatgatgaagaaagtgttggagtatctcaacggtacagaacatctccctcatgatgactacgtcgtctaaaagaggaaatggctaacgatgatctcgaaacgccgttgtacaaatcaagattggacccaagatgcataagcatgatatgaataatacatagaataacttttaaaaatggaaataagaatttctcgttttgagaaattaatttcattaaatattatcttcgattaaacaatcttcgtactcttccgagaaaatgaatattttaaaatatttgtgtttgattttaaattctaaatgatgtttgttcgtcgttttaggataactagtatgtattgttaaagaaaagataagcaaataaatagtattgttggcagacttttctagccctttcattgtaatttcaattatctttgttcaccagtagatttttatagtagcaacaaaatctagatttctatggaatttgggttcagtatagatttttttttttttttgttaaagggattagtttagattttggattggattcacctggttaatttaaaagaagggtatatgcactagatgaccatgaaatcaataataatatagaaactaactatgagtctatagtgtctgtcggagacgtatctgaaattacccgcaaccccctataactgtgttcttggttaggggacatataggtgtataggcgtatgattgcagaaatttgaattttgaaaaccttggtaagagcaatgctgtatgtggacgcaaacgatatagattttaatttcgagaaatcgatttattatcgaattttttgaaatatcaggagctccaaaaaaaaacctagcgccgcttcatttgctggttttccgagaggaaacgtcttccgttctctacccatagattctgcaaactctccgaatatctatttcaaatctatattgtttctcatacatatcgtttctttagattcaatctcgcagttaggcaatcaattccatcgggctacaggtaatttcacaaatatatgcggtttaagctattcaacgttctcgatcgccatcaacttctttatttctccaatctatattccgattaactgaaatcttaggtacatactgtttctgatttataaacttctattttgtgcagaaaagggttcgacttgtagatgatgaacaactctttaccccgtcgattgtttaggtctggatccgagcccaacggtgagagagtgcagtcctacagtgaactgtctttgatagatgacatcgctaacgcgttagatgcggaggacatgaaaattctccgggaatctcagtttgggaaattatttgatttctccgaaagcgccgcgtattctgggaagcttattcactttttgctaacgaggcagcttgttgttaggaagaaacaagaaatttgggtaattttctctggatcccctgttcggttttccatttctgagtttcaaaatgttaccggtttgaactgcgacaaaccgcctcgtatgaaagagaggaaagggaaacgaaaattggcgcctggcaagtattggtacagcctatttgaccgcagtgatgtatctgttgagtgggttgttggcaggctgaagaagcgagtggttcaagatcaaggaattcgtttacgttacgctgtgctggccttgattgatggcgttttatgcccaacctcgggtagaagtaaaatctctccggtccatgcggacatggcagaaaatttagacatgtttctaaattttccttgggggactatgtcattcctaatgacgttgaagagtgttactgcaaggggagctgataaacttatgcggaaatctatcaccgttcaaggtttcccacacgcactccaacttttgctactgcaaagtgttcctcgaatcagagaattgcaattccctgaagccgttgaagatagtgactcagaaatggaggaaacagatacggaaattgagcgcttatggagtttgaagttggatcttgtttggaaagtcgaccggcagtctcaggtgagcaatgcatctctgctctcgtaaattaattttcatatgctcgtttttatcatgaaaacctcttcttttcctatcaaaaacatacaattatagattcatatcattctgtgtaaacgtgtagcatgtggcttaggtttttaatatgtgttgatttactatttgttatttatatcatgatttctgtataaattgtatggttttaaatctgatcacagtttctttagaataatcataacatggctgtaaatgtgtagcatgtggttaagtttttttttaatatgtgctgatttactatttattatttatatcatgatttatgcaaaaactgcatggttttaaatatgatcacagttctttttaataaccataccctgttaccttagtaagtcacgtatggcggtatgcattacaacatctggttatatgatgaaataacatgttgtttttaaggagcacatgggtacataatctatatttcactgttagtaacagtataaatacttttagtacatgtaataaaacataatatcatgtggctaaagtctaactctttgtttttcagattaaagtcgtttctatttggagtggaacaccgactggtgacgctttcaagtcaggttgggtcgaggacgaagaagatctatctgttgactacatgttgcaactaataaaagaggagcacatattcaaggggtccatgttttcaggtggtgttgtccctgattcgctacccgatgaaaggaatgacaacagtgatgtatgtagcacttatgattgtgttgatgaggataccatacaacctgatgcttccttgcctggctcttctaaaccccgtaaaactaaagggcaggttcacataccagattcgattaaaaattacattgacatgaaagacaagcgtatggagtcgcgtatgttgaaggctatagctgattcagaggctagattgagcagcttgttgagggaaagccatggcaggaagaataagcgtcacagtggtcctaagtcaagagatgtgggtgagggattaggtgggaagaagggatcctcccttgttgttttggataatggcagggtagcccagtcgaaggagaacagtggttctggatttattgatcaagtcttaggtgaagtgatgcatgatattaacgacgcagaacctacacagactacaacccccataggtcgcttatccccaccgactaggcctggattgcgtagttctctggtatacgtttaacagttttgtaaatattctgtattttatgagagttcttcctaattcaagtattgttttcataacaaacagaaacggaagagaggcaacaatggcccaacagcagccaccatcctgacgccagcagtagacaacagttcagctgaaaagtctgtttctgctgataaacatgtatcccctgaagctgtcaatatcaacaaagttggaggggtggtgactgataccactgaggatgagtcagctagagatgggattcatgacattggctcttccactctgccggctaaagaattagacgatatgtttgcggaaaagtctgtttctggtgataaaactgtatcccatcaagataatatcttggttgatgcccccggtgatgggataggttgagagggccttgatgatatccaaactagccctgataaacctattccagctgcagcgagtcatactcagtgtttgcttcctcctcccacagacgtcaatgagttctttgaatctgagcccagcctccctgatccatatgtggtgcttgttgacatggatggtgttgcatacaatgtaggtcagccagagttgcagtacaccatcccatgcatagtgagttcaaaccttctcatatagtttttatgtttttttttttccgtgtattggctctaacgtctgttgtttgccttgcagatagagtctgatttgactgcccaatgtaagtcaacccccgggccaatggttgatgacggtgcttcagataaagatggagaaggacttgctgacccacctgctacagccgataatgttagatcatataattcattattttttactctcgttaccactaacaaactaattacatgcaactgtttcttattttaggccaatttaagccaaatgccgatgatatctgaaccgtccctgccagccccaacaaatgatattgtggaccctgatggcaaggttgcataaatgcgtttagctagtgttaaatatggatttcatagttttgtgttaggtctagtttgggtgcatgaatggttaagatattgttaaatatggatttcgtagttttgtggtaggtcaagtttacttattcatggtttttaaaaacaaaacactggtttaatatgcacacggttatattttgcgatacatcatgtattttcagcatggttcagggttttacctaatataacaaaaaaatatttaaaaagttttgtcatattgtaagtgttttgcccgtacaaacatcaaggttttagaacaaattacatgccattaagtttaacacagaatgtttaggattatgcaaactctaatttcctgattattaagataacatctgattttctaatcacgtttacgttgctcacagctccaacatgaatccgtaatagcctcttccacaagcggtaggtctgttacttttgggcatgatgttagccgtaagaacaagataaatcgcttatatggcatgtctgggtattaattccaaccttatgctattttattttgtttgactcatattacttaaaacttatgcatatggctgttattagggacattgattttggggcttgtcgaacactttccgccattgagttgcgtgagattgttgagttcaagaccgttgtacccaaaatggtatgataaatatcatgtgggtaaaaaagattacatagtgctctataaacatagggtttgccttaaacacctaatatgcgttctactctatttacaggttatggacatcttcattaatagcataaggattaactggtgtgcaaataatatcattgaaaagcaccaagccgtttcattcattgattcaacatttgtggttgaattatccaagcattacccaaaattcgtcaagtctgctgataagggaatgtatgggtttgatcacgacctacttgaatgtacccctacaggttctgctgtggtctacattccatttctcattgatttacagcattgggtagggctttgtgttgatatgagtgcaaggatcattagcgtcctcgactgctatacaggattatggcgtgaaacaaaattgaagaaagtgcttttgccccttgctgaaatgttaccatatctatttcgatttgctattaaaatggctggggaaaagaaacttcgtttgaaatctcttgcggttcacagagaaaatgatattccacaggcagattctgtaaaatattctggagtcatggcagctcgtttaattgaagcccatgccaatggtgggattcaggcttgcaaagaagtgaagcatgctgatgtggtgactgctgctaacaaatatttcattgccggttttgaattagctaatgggattgtctgacccaaatgttctagtgtgtttaccttctattacctgactctgtaatatattagacacctaacagttgagtacctaatgttctttctatgcacctgttttgtgtagtaaacatatgtcactgcaattctaatatgtaccgtgcgttttatatttacctcatgattcgtttaaatatagatgcattctaactgtggcttagttgatatttaggacttacccggttgtaaactttgcaataataatgacccgtttaaaaatattttggattatacaccttagacagattaacatgatcaaaaagtcaatataaaacatgtaatataggtacatatcacgccattttaatgtaatatcgttatttgacaccattatcataacgactaacacattagacataaaacatgtactttttacaaacagaatgtgatttatagatgctacgcgggttaatataaaataacagcatattattttaaaggatgcttcccttctggttacgagatttccacgttgggtgcagcttgtaccatctaacatcgccgacagaattcttttgaacaaaagaaaatgtagcactcttcgcatctattatatatgttgtggattgatacacatggaggatgggccccattccatgtaagcttgtaagctgtaccatggcgcacagccattcgttcataagctgaaaataaagaatcacccatagctaatacttcggcccaaggtagggcaaacagttgttcagtgaaaaattcacctagctccttctcaccaccacaaatagacaacatagccataacaaacagcgcctcatctaccttgtttacagctttaaaaatgtgtttttttgccatgactaaatctttctcccaacaagcataccttagcccttcaagataatgtgcttccgggttatttgcctccaatgcgtcgtcaaattgttttctgaacagcccacccacccgcatgagtactggattctgacgatactgtctcatttctacccttgcaagcatgtgtaagtaggccgaaggacgttttattattgacggagatgttgatagccaatatgtatatatagtccaatattgttagtgtatatattcactcatttatgtggcgtagttggggggtgaaatgtgtggtgcagaagcacttattgggttctgagaaaatagtcgaagtggcataaggaatcctatgtggaactgttcaactctcggtgcccggttttacctcacgcaattgctaaacatcacatgtggttttctcgaatagcatcttattttgatttatggttggaatgatttcatcttgttggaatccttgacataaaatgtcagttcatgatggctgaacatttttatggactttaatttgccagtaatggtgctatatctattcgttatatttgtttcatatatttcctcatttaaccccttgtctgtggatctgaattttacattacaccacgtattaataattaaacactcgcgtctttacttaatatcatgagtctgtttacaaaagggggaacataaagtttttttctacacaaaagccaaaaaacagaacattatcctttgtccgtagaaggtggtcttctatacggcacttactggaattggggtcccttgattgcattctcaacgtagcttttagttgccaccctaattgccacatctaattgctaatatgtacattataccaagtgacccttccttttacataatatccatatgtgatggacttccccttgcttatataacacaacatataactcatgaagaagacgcgagacacaacaccccctgcagatgatattataaaaattgtatgaacgttgtttctatctatagcatgatacggtataaaataacattgtacctttatatgggcattttgcacgtggcgcgattatggccggcgcctgtgcaacgagaacaacgtgttacttgtcgctggggacactgagatgaagattgagcaattgttaggaatttaaaacactaagggtgttacagtaaattccaaatgtataacgtttaccgtgaattccccccttgaagtaattcttttctttttcggccgtcccgatggacggcgcgtggctggcgggaagaggcggagagaggctattggttcaggtaaagcgaaaacgtcaccaacctcgggtacaggttttatggtacctaggtaagacattctccagctttcaacagaatattccggcgccatcagtccttgtattggaacgccttcagccactgcagccgctattgcgtgggggcaaggcaagtgaagcaaatcaaatgctctacaggagcatgtgcgttccataagcttcacgtggtagacacttgcgccttcctcccttatctcgtaatcgtacctgtcaaggcgatgaaccgcaaatcggactgatttttcaaagttacgatgaacaacttctctcatctttggtggtagaggcgatgcttcggttctagctgcctcacgcctcatagcaaaccaggaaattaatgtggtccgaatgaactctaacaaggaaatgattggtagttcacgggcttctttcaagactgcgttcaaagactccgccacattgctagtcatgacgttgtatcttttcccaaggaaataagcgcgtgtccaatggcaaaaaccaacagattccaagtatcgtgcgcaagccggatctagtcttatcacctcattgaaatatgtatgaaattcacagatccggaaagccctcgcagctcttgacacgtggaacagcaagtgtttcttcttatatgaggtcgctatgtttcgttgcagatgaacaatacatgccccgtgcttagcctttgggtagacctgcatgttaacatgtgttatacgtatatagcagggcatattggtagatagcatgtgttctaaaataaataagagccatatgctgtatataacatgtaacatttaaaattatcaattttaaggattacccttcgaagaccggtataaatggaggaatgtctgtctgagacgaaggtcaggttatctccatccggtatagcggtgctcaaaacacggaaaaaccattcccatgcgtcatcgttttcgctatcgaccacgccaaacgctatgggaaaaacctggaaattagcgtcttggccgctggcggttaggaggcatccaccgtatttgcctttcaggtgggcaccgtcaataacaatgactcgtttcatgcaagagaaaccttgaatcgatgcggcgaatgctaagaacatgtacttaaaccggtgattaccctttccatcaacctctgtctttagatcaacaattgaacctggattagcctcgcgcagcacatgtaggtaggctggcaacagagtgaaactattcgcagctgatccttgtgcactatccatcgcaatttctcttgatttccatgccttccaataggaaattctaactgagtaatcggtcaataggatgcgttgaaggtcaatagcccttggcccccgactgttgcccgcatatttagactgaattatgctgcctatgacccgcgttgttgctgctctgtggtaattactcctttcttctacagtgcaagtgtgctcgagattagcacttcgaatttggtaattgtcagaatcctccagcttgacgatgtatacacgccaagggcatgtttcagaaatgcaggttaaagtcattagtttcttgcaggaacgatcacgacggaaatggaaccgtctattaagtgcgtgaactgctaatttgacattgcaatcctgtttatttttgaatacccggccaacaaacagttcatcaccttcgtagaccacatcccgaattgctaattccattccgacgcggcctacacaacaataaagttcgtgtgttatttacactgtacacatgttgtgaatgtagaaagcatgtatttgtatgactaaatagtaacactttgaccaacataatatctatatcccatgatgttcaatattaaagcatgttactctatattttgattagggatatctcagggatatcaacgtaaattgaaaccatgtgttggtttgtaagcatatcattatattacatgatattaaatacaatttgttatttaaactaaacaaatatgatgtggatattaagattgtattcgtacgactaatcaggaattcagcgaaattaaatttttattgcatggtatttatacgaataacatgttactctatatgacggttattattagaacactcttgcaatatgtgttgttcttaaaaacaacatgctatgtaattggtaccttcttccccttgttcgtctagggttggcgctgcatccctgttgaaagatgcgaagttaaggcacatgtcttcaagagccttatgcagaggtaccgcgagatccaagtgtacacctagaggttccaccaagttagttgcggaaggcccaaaaaaattgcactccttaattgtctcgcccccgggatagtcgttttcgtcgttgtacgcttccccttcactgagagagtcgtaagattcagtggctaaattaattgacggtaaccccagatttttaagtaaatctgcctcaacaacagttgagtcttcttcctgcgtaaatagatgtcttagtactgtaatggtatattcgagtggctgaatttaataaacgcagaatattttacctgatctccatcttcagtcgctgtgtccatactttcagtcgttaacatcggggaagctgcctcaacagctggtctcacagggtgttgttgtacgttggtagaagagtctccaacgttttgaccttctgtttccgttgaacgcatccagcggaggaccgcctcgtcatccataagccttttccacacaacggactcgtagttaggtgatcgttcagcgttgacgtataaaggtgatttgcctttatctgcaaatccgtaacttgaagtctgacttgttccaccatcttcggaaccatcatccaccgtttgcttggagacaaacaaactcaagtcctccaactcaaaacgcatagctagaaacactcccattgtctcctctgaagttatgcttactggcttcgtgcgcccaccaaaggtagtttccatgtccatccaatcaggccattggtaagtcaggtgtagtgggccttcaacgtattcctgtccgtacgcttctctaacaagctggcgcacagatgctaacttctccccttccccaatgctcaacctcctcactgcattattgtgattggatatgaataaccatgttccatcagctccgattgcccaggagccactcaccgtcctgacataacgatcgtcggttatttcggttataaccaccatcggtacctacacattaatagagttgcattaaatagagataaatcaaccatgagttttttaaaaatagcaacaaacccgaccaaaagaacattcattaattgcataccaaaacagaaatgatcgagttcttcgatgttgttggatacgtagtgtgtgctttataggaagaagtagaggtgtgagagatgatatcttgccatctttcttcttttatagaaaaggttaactttgttttttagggctacagtaactaaagatatttctagtaacagttgcttaaccatttgcagccacgcgaatttcaaaacggtatgatttccctcccaacacccgagggaggcgtgaagcgacaattcacgaatgtcaaatcgaagtggtaagcgttctttatttgtattgcatgttatcgtcaaaataaccaggtgatttacttagtctttgctttacacattttcgtgaaccgaggtagtatatcttctgcccccacttgcctattcgtaatcttgacgtcattgaccaacgtgtcaacttaacgacctgccattctgtagcgtatagcataagcacacaaaccttgctttacacaattaaccaatgtcaaatcgaagtgttaagtgttctttatttgtattgcatgttatcgtcaaaataaccaggtgatttacttagtctttgctttacacattttcgtgaaccgaggtagtatatcttctgcccccacttgcctattcgtaatcttgacgtcattgaccaacgtgtcaacttaacgacctgccattctgtagcgtatagcataagcacacaaaccttgctttacacaattaaccaatgtcaaatcgaagtgttaagtgttctttatttgtattgcatgttatcgtcaaaataaccatgtgatttacttagtctttgctttacacatttccgtgaaccgaggtatagattcagtatatcttctgcccccacttgcctattcgtaatcttgacgtcattgaccaacgtgtcaacttatcgacctgccattttgtagcgtatagcataagcacacaaaccttgtgttaaaaagtgctacactaaagaaaagggtttacacatacaacaatatattacgttggaagctgtatatcctctgacgccgcattaaatgcgtctgatacgtatctccatctctctttgctcgcgctttttattgtcacatccgggaatttttctaataattttctcttatgttttctttccaagttgctccgatatgattattgtgattttaaaacatcacatgttgtttccgtagtacttgtgctgtttaccaaatcgtagtacttctgctggtcatagattcaaggtaaaagcccattcaccttgttgaataatcaatccagtacaatactcacccgaaaaagttaccagcccaatatcgtggtatatactccatttcaatactaatttttttgttttttaatgattatttttttaaaaaaaaaatgaaataaatcctttcatagtacatgctgctgcagttgtaaattgcatgtattttatgaaacgttcagtacaaacttagaaagttgtagtaatgaaagctctaaattgagatctacactcataaatagttcatgctttatttagtagtaactgcataagtaatgcatgctttttttttttgatacgttgtaatcattgccctacaatctctagctcccctacatctacaagtctgctgtcgggaatatggttttgccgcccatccgtagaggctatatcggatatttcgcatggtaaaaaaacgttatatacccaacttttctgggagaaggtcattctcttaataaggatgtcaaatttggtcattcagtaaattaacccttaaaagaatgtatgatgttgactactgaatccacatatttcttaatgaaagttgaattataactctacgtacgtaaatggaattatcaataggaacaaaactacaaaatgaatggctatgtcttgatttctgtgtcttcaaatttaatttcttaaaatgagcgtattagttatatttataattaaacttctttatttaacattttcatccatttttacatcggatcggatagtggctaataccaaaggcaacgtgtaagaatgtgaaccgcaatagctcaccagaaagaactaaggttaaagcagattagtgaaatgaccaaatatttgccaattaaattgagttgggagaggtttggtcgacattaattataaggttcacatttatgtgtaatgtgtagcatgtttatgattaatgtaaatgacaacattgcctaacagtacaaaactgaaaattgggatcactctcaaaaatagtattttgtagttcgtttttatattcaaattattataaccttcaacaaaaatttgctggttttttctgcctcactccagttctcatcacaagatcaaaatatggatcaaaggcccggcaaaatactatacaaaatttcaaatgattttttttttattttttttttttattttttaccctagaattggttgtaaatacttaacctatataagaatgaaccccctagatcacttttgtataattgaaactaattaattatggcattgagaactattcgtttaatcaaaagttaaacaatctgcttgtacacttcccagaaagttaatattttaaagtattctctattcaaatatgaatgatatttgttcgttgttttacaaaaaatagtttgtattgttaaagaaaaactaagaaaatatatatgacttagtgctgattacacatttcttaatgaaagttgagattttttcgtttatgtaatctatggaacttttatgtacatcatatggaattgagagattttctcaaaaaggtgtacatttgtagaagatttgcatgaaaacttctcttaattttgtagtatatataattatatatattttttaatcaaactccgcaagttataagaacaaaactatgaattgaatggtcaagtcttctttttcttcgttttcactttgaattattattttgatagtttatcctttattttggttagtttttaatatgaatattaacatttaaagttcattgtttagcagtttcaaggaatgttcatccaattttttatattagagaagaatatttgaggaaagtccgaatgaaattttcaaggacaataagaaaaaggtttgtttagcaattcattgaaagtcaaatactcaacttaagttgtataacttcttagtataaacaacaaaatggtttgaatatgtaatggtcaagagtttttgaagctataaaatggatagcaattaacagataagtaacttcaaactctaaaaactcatcaacgatgattaccttcaaatctatagctctaacgataatcttcctatcatattttgtttcttgtgtctcaagtcaacgagagaccaagtttcttaaccatggcttcctcggggctaatctcctcaacttcggctcctccaaggtctacccaagtggcctcttggagttgacaaacacttcgatgaggcagataggtcaagcttttcatggctttcccatccccttgtcaaaccctaactcaacaaattcggtttctttttccacaagcttcatcttcgccatcactcaaggaaccggcgcaccaggccatggcctagctttcgtcatttcaccctcgatggacttcagtggtgcttttcccagcaattatctgggcctcttcaacacctccaacaatggaaactccttgaatcgaattcttgcaattgaatttgacaccgtgcaagcggttgagttgaatgatattgacgataaccacgtaggcatcgacctaaatggagtgatctccattgcgtctgcaccggctgcatattttgatgaccgagaggccaagaacataagcttgaggctggcgagtgggaaaccagtaagagtctggatcgaatacaacgccactgagacaatgcttaatgtcacattggctcctctagatcgtccgaagccaagtatacctcttctctcgagaaaaatgaatctttcagggattttctcccaagaacatcacgttggattctctgcgtccacggggactgtagcgagctcacattttgttctaggttggagcttcaacatcgaagggaaagaatcagactttgatatcacgaagcttccttctctcccagatccgccaccaacattgtctccatccccaagtcctccggtttcaaccgagaagaagtcgaacaacacgatgctgatcataatcgtcgctgcatcagcaacggttgcactcatgatcctaatcttctcaggattttggttcttacgtagagacaaaatattcttcatcggaggtgcaaggaaattctcctaccagacgatatcgaacgcaacgggaggtttcgacaattctaaactcttgggagagagaaactctggaagtttctacaaaggacagcttgctcccacagagataattgccgtaaagaagattacttgcaccacaaggcaacaaaagacaaccctaatagccgagatcgatgcgatctccaagattaaacaacgaaacctagtcaatctacatggttactgcagcaaaggaaaagatatctatcttgtttacgagtatgtccccaatggaagcctagaccggttcttgttcaacaacgaccgaccagttctcacctggtcagatcggttctgtataataaaggggattgcagcagcacttcaacaccttcacggtgaaggtcaaaaacctttgattcatggaaacgtaaaagcaagcaacgtactcttagacgaagagctaaacgctcgactaggcgactatggacaaggaagcagacacagcaccacagggcacgttgcaccagaactagtcaacacgggaaaggtaacacgtgacacagatgtgtttgcgtttggagtgttgatgatggagatcgtttgtggaaggaaggccatagagccgactaaagcaccagaagagataagtttggtgaactgggtgcttcaagggttcaagaaaggtgatctgttaatgagctgcgacacaagaatcaatagagagaatttggtagctcgagaagtattattggttctgaaaacaggacttctctgcgccaaccgatctccagaatcaaggccaatgatgaaaaatgtgtttcggtatctcgaaggaactgaagctctccctcatgatgactacctcttctatggagtctaaaaagtgatctcacaaacgtgtctgtattttgaattgtgtgatttcaagattggacgaagatgcattaagcatgatgatgtgaataaagcctataattgtattttactccatttgtaaatttgaaaataagaatttctggttttgagaaatattttcttgttgttaggacaatctgatcctactcttctgggaaaatgatcattacaaaatatatctttgatctatttaaaatctaaatgatattttgttatgtcagtttaggatacatagctacgaaacttatatcatgacttcatcatatacaggaatattttccatgaaaacatctcttgggttttttttgttagcttatattaacctaaatggttttttaaagcttatgttaacataaagggaccacccaatgcaagaaacaattttgctatcataattgtcacttgtccaattttgctatcataattgtcacttgtccaattttgctgccaccaacaaacagaccacataagaaagtttggaacatgtaagaaaaaacacaacataagatgatgttcataaatctagcaagggatagtatcataaaagatgatgttcaaataacgctggacaagggacttagtggctaatgcccttctttgctttcaatgactcgagtgctttgtttcgcaactcaatttcaagcctctttggatcagattcctccccttttttaatcttaggacgggcctcaacttcaccttctgaagtatcagaaagctcttgtttcttatgcttctcctttccaccacgacgttcttcccttttacgatgtctctcctctcgcctacgtttcttctcctcctttctcgttttcttctcctccttcctcctccttttagcctccttcctatcatctacgtcggaatcagaactgccattatcatctgaagatacttcttcccttgaagaccttttattctttcttctatttttatccttaatttgatgtctgatggtatccttagaatcacaggaaaggtttgcatccaggtcgctgttatcctctttctcaacctgctcactgtctttcactttactagaaacaggccgactccttccttctgaattttctactggggacatctgtgaaccatggtgtctgtgaacagatcgcttctctgacaacttatcactgttaagaagttgaatagaccaacatttatcagaccttgatatttgaagtcaaacgaaaatcatttggaaaatgaaaagaaacaaaatgcacctctttctctcctgctccttataatgttctacacgcccaacttctagcaacttctctggtaattgtttcctcttgtcagtatcaggcactgaagttctctttaacagcttggaattttgaaccctgtcacaatgcgaaagcagacagagggtcaaggagttaacaagtacagataagaagaagattatagtaaatggagtcatgaagaccatacctatcttgttcttcagatagacgcccaggagatcttctctctctctgatgttttcttccacgtggagaaggagatctatgaagaacaggaggtgatcgcgacctagaaggagatctgctcgaagatggagaccgtctcctgcgtctatcaggtgatcgtgaagcagatgaagatcttcgacttcgccggttgacaggtgttggtgatctgcgccgaacaggagagcgcgctttctgatgtcgagatgaaggagaagatttacctcgacccctaacaggtgacatagatccatcttgcttgatatgtgaaggggaagtatggcgtccaccttgtgacagggagactcgctcttcgtcaggtgtcagtgacctgcgtcttctaacaggtggagatggtaacacttttttcctaccaggaggggacaatgagctgggtgatggtgattccaggtgattggctgcatgagatcctccaatcctcattggtgaaggtaatcctgcacgcctagggggtggtgaaggcaacctttgcgcagggggtggtgaaggtaatcctgcacgcctagggggtggtgaaggcaacctttgtgcaacgggtggtgaaggcaatctttgctcaatggatggtgaaggcaatcttgccccagtgggatccctgagcctagccactggtgacggagacctccctggtgagtcagaccttccccgcttagccagcggtgaccgtgacctgttacgcctatagagtggagatggagacctgttacgcctgtagagtggagatggagacctacgccgcctagctggcggtgaaggagacctacgccgcctagctggcggtgaaggagacctacgccgcctagctggcggtggagaacggtgacgcctagcagggggcgatggtgacctgcgctgccttgcaggtggtgttggagacctgtgccgtctagcaggtggtgatggtgacctgcgccgtctagcaggtggggatggtgacctgcgccgtctagcaggtggggatggagaacggcgacgtcttgaaggggctggtgattgacggcgtccctcatgcgtaggtcgcctgtgacgtctaataggtgaccgcgacctgcttctgaaaggagagtgtatcctacgtcgccgaggagacagagacctacgcacggaacgtgatctggatctacgtcttgaattcgacaatcttcgctttctaggtgagatggaggcatctgatgattgagatgtgctcctggatttccgttcgctgttataaaagtagacagcattagcaaaaactgcactaggatttacagaaaataatagatacagaactagctagctacacatcacaggctacaatttctttggattaagaaaaacaattgcagaaggctacatacccagaataacttttcgagcctgaatttgttttgctgattgacctagaacgtgaccctctgtaaagcaaccaatcaatatatacttgcacatataagcaaattgtattagaaaaaacaaaactattgaagagtcacctaaggggtgagcgggatgcatctccgcgacgtggaggtatcagatccctgcatcaagtggaggcaatgtcagaacccacttacataataatcttggccacaaacaaattcctggaccaccagcaaaccaaatgcacatgcaaagtaccagtagcatacctaaaaatgctaaaagactagaagacccagaacagtcatttatagaaatacttgaacaactcatgcccacgagttcttatagagaaaatcaacgtacaaagttatgagtagactagaaggatgaactcaatcaataataaagtacacaagggaatacagcgatgagtagagagtagctatgaaatcataggcattaagagaactctaccttctcctttcttttacaccattcttctcgtcagcccttctcccatcctctggacgatctcttgaaggttttgcatccatgccatttgtctccttatgttctacaccgctgtcctacagtagttgaggtaaagcacatgaaccctaataattgcagaagctatctgaataacatgaaagaacaggcgaatgttaaaaccagaagagcatctctaaagctgaaactctagcatgaataagaacgtcttactattttcctcaatatatcgtgctcaatgttcttcttatctccctccctcttcttcattatttcatttgcttcttcctgccacataaaggataataatcatgaaacagtaggacagagacaagtcgttcaccaaactaacttcagaatgagttcccaagaatacctgtttcttctttgtttcagcagctctagcatctaaaaactgctgtggaacaccacttggattattctgtgcgcttagaagaagtgtccaaagttctttcataaatttgccagtatttttctccatgaatccagttagcgttatctgaatctccttaccattcactacctacatacatagtgaacgttcaattacatattagtccaacaaaaaaaaatcacttgtatcaatggcatgggctacgaaatcatactacccctctgtcacttattaacagtcgaataaaaagctcagaaaaataaaatctcagtaatgagcttaccttcccgtcaagcagaccatagataaagttaatcagcacttcatcttcaataccaagaagctcagtgactctagtcgcaatccaaggtttcataacatccatcttcactttagtgatatccacctaacaccaaggcaagtagaagacatcattaagccctccccaaacttaatttcatagtaacatatgtatcgaattatctggtaatcgaatctcaattaagtaaattcaagctacgaattcacaaatcgttaaaatggacgagtacacaaagagaaaactcaccagattctctaactccggagcaaatttctggcttttcatcaatttagcttgcttgttagaaaaccgagtatcctgctcggcggaagtaccctaaaagctcaaaacaaagaagttattaaaccatgggaacttcaacaaaacttttgaattgcatcgatctggatctaaaagatgagagatcaattgagaaaattgatcggaaaactaacccggaagaaaccgccggacatagtttagggtttgtggaagcactagctcgtctctagaagaaagatcgaagcttgagagagatttgtgagatttagatgtgaaaatggggcttccacagagattttgaagagtttttaacgagccctagctatatcggactcacttcattttgtttttccattgttaccctcagaggttttgagaattacgttattgccatttattggaacatgttcggtctcatcttcttgacaagccttttttgtaatctgattggtttcaattgccatagcttatgggccagttttagcccaaagcaaacctagtcttaattaatctcgtaggtctatttgaatgagtaaaacattttatcttattggtacatatgcaattttggaagtggtttttttcttctaaaacgaacagtgtggtcacggaaatttatgtgcattgtgtggactgattaagcaattgaaaatggttttaggttaagtagggttggtagatgaagttaataagagagagagaagatgaaacttgaaagtgtttgaggtttaagagataaatgtggaaaaggaatggaaaagttacatgtggtggtaatcttgaaagtgaaatagattagagtaatcaatgtgaaccttatgggacgtgaaaggaagatgactatgattataagttttggggtgtgcattactcggtaaaaatatgggttggtgcaacaaaatgaaggagttaggtttggtcaactcgtcctactacattagagtaacttatgtttcttaaaccataggtgaaagtgtgggtggaaactatataacagttgtttgatcgtaatttgtgtggacaacaagtgcgcatggaaggtgtatgggcacacaatataaggtaggtatgagaattgagaacatataagtatgcaaatggaaaaatgagagcaatgactatagttatctctaatattgtattagactagattttaacccgcagtacaccgcggaaacaatttatttttttaattaatatatataaaagtttgtaaattttatctatctataaaatatttttattgtatagtttacaattgttattaaataacgtcctgccaaactcgtcccgccaacccgtcctctaaaaaaaactcatttattttattaatgttgattttatttatgatatgtttatgaattattgtctaaatattttgtaattttgtagtaattaaatgctatcaaatatctctacggtttgatgattataatcatgcagaaaagcaatatcaaaaatgataattttgtagtaattaaatgatattaaatattttagaagttttattttagtaattaatcgtgtagttaaggttgagagattttgggaagattgttaaatgtcaaatatttaattagaagattttctttctaattatcaaaaacaattattaaatgccagtggcagccgttgtaaataaatcccaactccagtatttatttcacaaagtagcagcaaaaatgtatatatagatgagctcataactctgtgtttcagtttcatatatgagggcatgtcatgcaaaagataataacatattttcttttgtcatcaccatcatcgaaattatggactttgacgtatttgtatgatatataaagcaaaatttatgtcagtaaagaaaaaaatcaacttggaagactttttaagattcgttatttaatttattttttctttccaattacaaacaaactttgcctctacatgaatcaaaaaaccgtaaaaacagaaacatttttgcaaccgtcactaacgttatcatcatcgaattaacgaattcaccaaatctttgctgacaagaaaataatgtaagtttcgcctaacatctccgctgaaaaaaaagcaaaactttcataaatttaaataaaatctcaaaagttaagaggtaaatataatatttttttgtcattttcctaattaagaaatcctactatattatttaggaagtacattttaaatataaccttattttttgtaagtaattacataagtatgccattagaaataaaatttaaagagtacattaattcatctctttaataattaagtcaaatactaatttaattaattaaatttaattaaaaaacaaaatacattattaatttccaaaaaagtaaccaattaaaatcaacaaattagatttgatatctaaattatcatattaattttttattaattattatagttcacctctcatctttatatgattctattttggcgaaaaaataatatcatcgttataaaaaaataattagagttttttcgcatatgccataatttgaatttttaaaaactaatataaactgttcaatacatgaaaaaatattataacgggtcaaaaatagatttaagaaaattttctactgaatactgggtcataatttgaatatttatattcaatttcatacatattattttaaaaatttataatcttatatactacaataattaataacatattagatttttttatgtgtatgatgtgattcaatttttaatacaagatagaaaatcctagaattgacgggtttaaatcgatattaatacaagatggtatactacatgtgaaactctaaaattaacaatcaaaatacaagtgtataattttaaacactaaacaatataaataatatcaacaaaacatatacaactcgcagtttactatacatttaaaatcaaataaaataatatcatatatttataatcatctttacaataaaaatttttagtttaaataaaatataagcctacatgtggtatactgcaagttaaaattataaataagcagattaccatcacgatgtccgtaccttctcacatacacacttatcaaaaattataaataagcattttaaatgtaaccttattttttgtaagtaattacataggtatgccattagaaataaaaacttaaaactttttaaaacctcttggtatatacaaattaggattcttcattcataaaatcattattccaagggttttgggatgtcttatgaaatgattttggtagaagaggatgtacatttttttgaataaaaagtagtcagcaaaacatatgttttttttgggagtttttagataattaaatcagagaatagggttgggcatacgagtaacccattcgagttctggtagaacccgttcgggtttgggattaatgggtatatgatttactatccaatagaataattctaaatatttggttctggttcgggtcggatccagttgggtttgggtcagtttggataaaaagtttcagaccctaaaaatatccaaaaaaaaatagaaactggaaatttgtatgtacatagcgggtctccaaacaaaaaaaacttttaaatttgttaagttttaataaatttaattatatttgaatatattttacaaaattttgacaaacataacaaatcatttttgaatagtttagttgttttggatatttaggtccaaaattaattgacatatttaaatttataattataatcttagataattagataatattacgattaaatataattaatattttggatattaaattaatgtttgggtttttgaatactttgttttgtaccaggtaatttccagaccaatcggatatccacgggtttactaaaactctacccaataaggaaatttcctaaaattttaacccgccctaacccgtttttttggttcgggtattgagttggttattgggtccgttttttcgtcagccctatcaaagataatctaatataggcctcaattaggtccacaaatataatccaaatactatacaaagactaattctaagttaggccaaaaattagaccctttaatacaaaggaaacatgtttcttaccaaaacaacttgtatacaaattttacacatttacttaaaactacatatgttgtatttattataaaaataacatttttaaacaaagtcaattcaatgcagcattatatgcaaatagtaaaaacattgaaaaatattatggcatcacttttatattatactatttcttatgtaattcaaacaaagtatacaatttaatttatacaaaatattaatgttcgtgctgtacagcacgagttatgatctagttctcttttattattgagcgcgctaatttattcctttttaattatcataaaatctttaaaattttaaatagccccaaaaatgttgggtttaaaaagtgtataaaattttagaaacaagtcatatttgatttaggaacatttccacctaaaaaaattagaaacttttagtaaacataaaactttaaggtactttgagaaatgttccaaaattgtggtattgataaaacaaataaagttacacaaaaattaatctataatatactaattttgaactaaaataaaaacctaaagatccttgtcatctagaagtgttgtactttggtaaaggtctctgctctaaaacccaaactgaaacataaagccaaaagatctcaaaacagttccaacgagaaaaataaggtttgttatcttccaattttcataatgtttttttatattcctttgtgcaatcgctaagtcaaaccaaccctaatattatttcgccgtaatttttaatttccaaagataatcataaaaaaaaaggaacaaaaaccctaaggttcttgcatcgccgtcgtattattccgtcaacactataaaacccacattttcctatctctctcaatctaaagtctttgttagggttctttatttttaaaacaaacagtaaccagaaaaaataatcaaatcatcgaatgggtttgagtatcgcttaataaagttttgatctttgggtttagttctaaaaacagagaattttggggattgtatatatttgaggtataaagttttgatctttatgattttttttcgtaatggtgtgagtataaactattgaattgattttgggttttttgttgtttaggtgacaatgataccggaactagggagaagaccgatgcatagaggtaacgaagattcatcttttggggatgattatgagaaagagattggagtattgcttggtgagcagcagagaaggcaagtagaagctgatgagcttgagagagagcttaacttgtttagaagtggctctgctccaccgactgttgatggttctgttagtgctgccggagggctttttagcggcggaggtggggctccttttttggagtttggtggtgttaataagggtaatgggtttggtggtgatgatgaggagtttaggaaagatccggcttacttgtcttattactatgctaatatgaagttgaatccgaggttgccaccgcctttgatgtctagggaggatttgagggttgctcagaggcttaaagggagtaataatgtgttaggtggtgttggggataggagaaaagttaatgataatcgatctttgttctctatgccaccgggttttgaaggtgagaaaactggtgcttctgcttctgaatgggatgctaatggattgattggtttaccgggtttgggacttggaggcaagcagaagagttttgctgatatctttcaggttggtgatacctcttcttatttacttcttttggttgtctatagttgattatgctttgacgctttgctaatgttttctctgtgtgtgtgttgtgtatatttctccttgatattcttccttatgtaaacttggtgtattgcttttgtgcaggctgatatggggcatggacatcctgtcgcacaacagccctcacgtcctgcaagtcgtaatacctttgatgaaaatgttgactctaataataatctgtctccgtctgcatcacaaggcattggtgcaccatctccatacagctatgcagctgttctaggctcttctttgtctagaaatggaactccagatccacaggccattgctagggtgcctagtccctgtcttactcccattgggagtggaagaatgagttcaaatgataagaggaacacaagtaaccagagcccattcaatggtgttacctctggtctcaacgagtcttctgatcttgtcaatgctttatctggcttgaacctgtcatgcagtgttgggttagatgatcggagtcaggctgagcaagatgtcgaaaaggtcaggaactatatgtttggactgcaaggtgggcataacgaagtcaatcaacatgagttcccaaacaaatctgatcaagcccataaggcaactggctcgttgaggaattcacaattgagagggccacacggatctgcctataatggtggagttggattagctaatccttaccagcaacttgatagcccaaattattgtctcaacaattacgcattaaatccagctgtagcctctatgatggctaaccaacttgggaacaataactttgctccaatgtatgataatgtatccgctttgggattttctggaatggactctagacatcatggacgaggctttgtatcttctggtcaaaacctctctgaatcacgtaatcttggcagattcagtaatcgaatgatgggaggaggtgctggtctccagtcacatatggtagacccaatgtataatcagtatgctgattcacttgatcttctcaatgatccttccatggataggaactttatgggtggttcatcatacatggatatgcttgaactccagagggcttatcttggagctcagaaatcacagtatggtgtcccttacaaatccgggagccctaacagccatagctattatgggagtccaacatttgggtctaatatgtcatatcctggcagcccattggctcatcatggtatgccaaactctcttatgtcaccttatagccctatgagacgggatgaagttaatatgcgatttccttctgcaacaagaaattattcgggagggttaatgggttcttggcacatggatgctagttttgatgaaggctttggatcttcaatgcttgaagagttcaaaagtaacaaaacaagaggatttgaactttctgaaatagctggccatgttgtggagttcaggtatttccttgaaagtcttttacattttctcttgtttacaatttttcccaagctaacgcgtacttggggattttcatggcatgaccgaccagttcggatcaatatggaagccgctttattcagcagaaactcgagacagcaacaactgatgagaaaaacatggtctatgaggagatcatgccacaagctcttgtcctgatgactgacgtttttggaaactatgtgattcagaaggtaatttatttagtcttcctctttggttttattttgaagttaagccatagtaagatgagtgattcctgaattttgcttatcttcctacagttctttgagcatggactcccgccacagaggagagaattggcagagaaactctttgaccatgttttgcctcttagcttacagatgtatggttgccgtgtcatccagaaggtaaagtctagttcccacctgttttactgttctctccattctcaagaacagttaagagtttcattatttttcatatgtttacctttttaggcaattgaggtggttgatctagaccagaaaattaaaatggtgaaagaacttgatggacatgtaatgcgatgtgtacgtgatcagaatgggaaccatgtggttcaaaagtgtattgaatgtgtgcctgaagaaaacatcgagtttattatttcaactttctttggccatgtggtgaccctctccactcacccatatgggtgccgtgttattcaggttcttgctattggtgattgagaaagatgacaccttttttgatcttatgcttctatgtaaaactctttttcatctcctgttgcagagagtattggaacactgccatgaccctgatacacagagtaaggttatggaagaaatcctgtccactgttagtatgctggcccaagatcagtatggaaactatgttgttcaggtttgtaaaaagatatgagttttactccttctggtgattttttatactttgctcaaaactgatacatgttttgtggacagcatgtgctggagcatggaaagcctgatgagcgcactgtgataatcaaagaattggcggggaagattgttcagatgagccagcagaagttcgcatcaaacgttgttgagaaatgtttgacttttggaggtcctgaggaacgagaattgcttgtgaatgagatgctgggaacaactgatgaaaacgagcctcttcaggtctgtcaaacctttatttcagatgattgtcgggggaaataaagaaactattagctcatagcttcttcttcttggtatataggcgatgatgaaggatcagttcgcaaactatgtagtgcagaaagttttggagacctgtgatgaccaacaacgtgagctgatacttactcgcatcaaagtgcatcttactgctttaaaaaagtacacttatggaaagcatgtcgttgcgcgtattgaaaaactcgttgctgctggaggtatgtatatgttcctcttctcttctatgagcacattgcatttactgcatttatttgagaaagagagacaaaataagcatttttatgacatttcattgtctctaagtggttcttttcttatatgcagagaggagaatggctttgcagtccctaacccagccccagatggcttaagaccttaagtaatgtacagcttaactagggtggatggggctgccgtagcgttttgagaattaggtaagatctaaaccggaaataatctgcggggaaattgtgaaggagagctttgttttctctgctaaatctgtaaaattgtgtagtttgcttacggtttttctatacatagaacgaaacatccctctttaggctgatgagtgagagataaaaaggcagagaatggtgtaaagatggattttagggtttccttcacacaaaagagaatggctttttcattgccaaatgtgtagaagtgagaatatgtgttcatgcttttaggacaatcccagtttagagtttttttttctccatctatgtaatttgtttcatcaaactcttgtttcctatttcacgaggaactttttcgtttcggctagtttgcaatcttcttgtttatatcgatccagttgattggtaacgtatcatagatgtaacaatcacatagcaaccttacaaacaaaatcaatcttggtctctctgcacacagtggaatagaatcattcacaatcaatttttaatcttatgaacctcttggtccagttttggctcacattgccttcttttggccacctttcttagacttcttcgatgctttatctttctcaaacctctctctttagtctttactcttcccaagaaactcagtcactccaatgtacacagagatgagaagagtagagaagcacttgtataatcaaagcaacaccatcttgaccaccacttgacacaattgcttcagaagaagaagatgaaaagatgaagcaggaaaaacttctctttaagtcgctgaacaagcttaagtggcaagaagactcttgtgggaagagaaggttctcaagggagaaagagacaaagtgtgattttcttacattgccttaagtgttgtcgtttaacaagaatgtgtcatgtgtctctgtatttaagggactccgaaatgttagggtttccttatgcaaaacaataccaacaattattaatctcaattcttccttccatttctatctctctcactctctttctctctcgatcttcttcttcttcaactcttctgtcgataggctcagtatcggatttttcgtcaacactataaaacccatttttctatctctctgtctaaaagtctttactttaaaacaaacagtgacatgaaaaatcaaagcttcgatacaatctcaggatggatttgagtatcgcttaatgaagttttgatctttgggtttagttctacaacagagtatttcgaggattgtatatattgaggtataaagttttgatctttatgatttttatgtttcttttcctgaagagtttagtgtatatgagtacaatctgataaagtggttatagggtttttgttgtttaggtgataatgataccggaactggggagaagaccgatgcatagagggaacgaagattcatcttttggggatgattatgagaaagagattggagtattacttggtgagcagcagagaaggcaagtagaagctgatgagcttgagagagagcttaatttgtataggagtggctctgctccaccgactgttgatggttctgttagtgctgctggagggctttttagcggcggaggtggggctccttttttggagtttggtggaggcaacaagggtaatgggtttggtggcgatgatgaggagtttaggaaagatccggcttacttgtcttattactatgctaatatgaagttgaatccgaggttgccaccgcctttgatgtctagggaggatttgagggttgctcagaggcttaaagggagtagtaatgttttaggtggtgttggggataggaggaaagttaatgatagtcaatctttattctctatgccacctggttttgatcagaggaagcagcatgagtttgaggttgagaaaactagtgcttcttcttctgaatgggatgctaatggattgatcggtttgccgggtttggggattggaggcaagcagaagagttttgctgatatctttcaggttggtgatacctcttcttattacgacaacgcttcttgttagcttctttctggtgtctatagttgattatgctttgatactttgttaatgttttctctcaaagataattctctctgtatttgtatatttctgcaacagatattcttgcttatgtaaacttgatggattgctttttgtgcaggctgatatggggcatggacatcctgtcactaagcagccctcacgtcctgcaagtcgtaatacctttgatgaaaatgttgactctaagaataatctgtctccatctgcatcgcaaggcattggtgcaccatctccatacagctatgcagctgttctgggttcgtctttgtctagaaatggaactccagatccacaggccattgctagggtgcctagtccctgtcttactcccattgggagtgggagagtgagttcaaatgataagaggaacacaagtaatcaaagcccgttcaacggtgggctcaacgagtcttctgatcttgtcaatgctttatctggcatgaacctgtctggcagtggcgggttagatgaacgtggtcaggctgagcaagatgtggaaaaggtcaggaactatatgtttggactgcaaggtgggcataacgaagtcaatcaacatgggttcccaaacaaatctgatcaagcccagaaggcaactggcttgttgaggaattcacaattgagaggggcacaaggatctacctataatgatggaggtggagtagctactcagtaccagcatcttgatagcccaaactattgtctcaacaattatggattaaatccagctgtagcttctatgatggctaaccaacttggaactaataactattctccagtgtatgaaaatgcttctgcagcatctgctatgggattttctggaatggattccagacttcatggtggaggttatgtatcatctggtcaaaacctctctgaatcacgtaatcttggcagattcagtaatcgaatgatgggaggaggtactggtcttcagtcacatatggcagatccaatgtatcatcagtatgctgattcgcttgatcttctcaatgatccttccatggacgtgaactttatgggtaattcatacatgaatatgcttgaactccagagggcttatcttggagcacagaaatcacagtacggtgtcccttacaaatccgggagccctaacagccacaccgattatgggagtccaacatttgggtcatatcctggcagcccattggctcatcatcttctgcctaattctcttgtgtcaccctgtagccctatgagacgaggtgaagttaatatgcgatatccctctgcaacaagaaactacgcaggaggggtaatgggttcctggcacatggatgctagtttggatgaaggctttggatcttcaatgcttgaagagttcaaaagtaacaaaacaagaggattcgaacttgctgaaatagctggccatgttgtagagttcaggtattcccttgaatgtcttttatcttttttcttgtgtacaatttgtcccaagctaacgtgtacttggggattttcatgaccagttcggatcagtatggaagccggtttattcagcagaaactcgagacagcaacaagtgatgagaaaaacatggtttatgaggagatcatgccacacgctcttgccctgatgactgacgtttttggaaactatgtgattcagaaggtagatttatttagtcttcctctttggttttattttagagttgagataagagattcctgaattttgcttatcttcctacagttctttgagcatggactcccaccacagagaagagaattggcagataaactctttgacaatgttttgcctcttagcctacagatgtatggttgtcgtgttattcagaaggtatgttttactcttctctttaagtctatcttcgattctcaaaatggtttgctatgtttataagtcttatcttcgatccaggacagttaagagttttgttatgtttatccttttaggcaattgaggtggttgatctagaccagaaaattaaaatggtgaaagaactcgatggacatgtgatgcgatgcgtacgtgatcagaatgggaaccatgtggttcaaaagtgtattgaatgtgtgcctgaagaaaacatcgaatttattatttccaccttctttggcaatgttgtgaccctctccactcacccatatgggtgccgagttattcaggttcttgctcttagtaataaagaaaaattacacagttcttgatcttatgcttctaagtaaaacacttctcgtcttatgttgcagagggtattggagcactgccatgaccctgatactcagagtaaggttatggatgaaatcatgtcaactattagtatgctggcccaagatcagtatggaaactatgttattcaggtttgttaaaaaagagttatactacaactggttattttgtataggttgcttaaaaactaatacacgttttgttgacagcatgtattggaacacggaaagcctgatgagcgtactgtgattatcaaggaattagcggggaagattgttcagatgagccaacagaagtttgcttcaaacgttgttgagaaatgtttgacttttggagggccagaggaacgggaatttctggtaaatgagatgctgggcacaactgatgaaaacgagcctcttcaggtttgtcaaacacatactttcagatgattgttggagaaaataaagaaactattagctcataagcttcttcatcttttgtatttaggcgatgatgaaggatcagtttgccaactatgtagtgcaaaaagttttagagacatgtgatgaccaacagcgtgagctgatccttggtcgtattaaagtgcatctcaatgctttaaagaaatacacttatggaaagcatatcgttgctcgtgttgaaaaactcgttgctgctggaggtatgtttaatatgttctttggctccaaagtttcgacctttacctgctataaacctttcaaattgtcttcacttcgttttatttgtatcatcttacttgattgaagagacttctataaggattggagaaagaaagacaatatattgcgtgtcaatgtctctaagtgggttttttctcatatacagagaggaggatggctttgcagtccctaacccagcctcagatggcgtaaggccgcaagtgttgtacagcttaactagggtggatggctctgccatagcgttttgagaattaggtaaaatctaaaccggaaataatctgcgggaaaattgtgaaggagagctttgttttctctgcaaatctgtaaaattgtgtagttgcttacggtttttctatacatagaaccaaacatcccactttaggctgatgagtaagagaggaaatatgcagagaatggtgtaaaggtgggctgaggtatggtgaggattttagggtttcctttacacgaaagagaatggctttttcattgccaaatgtgtagaagtgagaatatgttcatgcttttaggacaatcctagtgtttagagttttttctccatctatgtaatttgtttcatcaaactcttgtttcctatttcactagtaactctttcgtttctgtaatattgcaatatttttgttatatcgaccatcaagttgcttggtacacaagaaacatatcatagatgtgacaatcactgagcaacattacaaacaaaatcaatctttgtctctctactacacacaaaatcactcaagatcaatgtcgatgtcatcatcttcaatcttctgaccaaaacctcttggtccagctctggctctcattgccttcttcttcccacctttcttagacttctttgctgcctcgtctttctcaaacttctctctctccctcttcccaagaaactcagtcactccaatgtacacaacctgtaatgaaataaaaccggtttagagactcacaaaccgggcttcaggtttggttctgtattttgatttgacatagtttatggataagattggttttgtggataacacttacaccaatggtgagaaccgtgagagcaagaaatgcaacaaagagaagcacttgtataatcaaagcaacaccatcttgtccaccactagacacaactgctccagaagaagaagatgaatcagaagaaacgatctcttgggaaatttcttccggagttgcagagactctccatagttgggttttttcttggtgaagacgaagaaccctaaaagacaagatctttcttcttgaaacagaccaagagagtggagatatatggtggcctttaactggagtttggaatcttggtctgaaatttgaaagagatagagatggtgttgttgtcgcagacatctttccgtccactcccacactctctgatctcttcagattctggacataacccacttctgtttggttacatccaacggttcatgttttcttgagattgagaacagattattgatgggccaagaaaagcccaatatattattttcgtgggccttatatttctattagtttttgattatgcatcattagttacgccatcatcactaaactacagtcttaagattgtttactttgatctctaatttttctacccaccacaacagtcacaacgtcaagagatacgttagctttcctcaatttcttcaaacaatctcatagcctcgtatcattaattcatcataaatagccatttttcattatcatttctcatcaaaatacatcattacacaacaatggctagagcagaacagagctcaacccatgttacatggggtctttagtttttctcaaacaatgaaacatgagtcgatcccatgtagttggggcttaacccttaatcgaggcccattattttgagtaacctaagaaaaacatcaaaaggccttactgtgtacgaacgtcattactcattattatcattcattcattcattatgaatttttctcaaccataaattcagatctccaagaaaatatctttgggtctgtggctcataatcagaggtggctaagacattcagacaggggtttcaaaggacaaagttaaacaattcacgtaaaagtatctttggccaccctcacgactagtcttccacctcttggccttaaatatgtgaccttcattgaagaaaatagtatccagaaatggctaaagcagaagaaaacttgagagacaaatgtagatggagccttggaggcatgaccgctctcgttaccggtggctccaaaggcctcgggtcagtccccctactaatccaatattgaatacattaatatgtcatattacatatttgcacgtgtcaatatgtatacaactgtgttatgaatagggaagctgtggtggaggaactagccatgttaggagcaagagtccacacatgtgctagaaacgaaactcagcttcaagaatgcgtacgtgaatggcaagctaaagggtttgaggtcaccacttctgtatgcgacgtttcttctcgtgaccaacgagagaaactcatggaaaacgttgcctctatcttccaaggaaaactcaacatccttgtaagtttatgtataagagcataatgcataaggttttgagcaagatcaagtgatttttttgttgtgtatttgttggaagtgatcaagtcatcatcttattttagaagagatatattatatagtgaagtaactggtttatatatattcgtatcacacatcgaagagatacaaatataattgttaactacaaaacagttacatgtgtgtatgtgtctctacattaggttgtcttctagagacgtgtcccttagtcaaagtgtgtcatgtaaacctataaatacagtttgtatatgtaataaaagtgtgtggttttcgttttataaaaacagagtgaaatatagagtaagacaaaacagagtaaaatctgtgttgtccgatccttaacaactttgagagttcaaagttctacatggtatcagagctatggagacaacaatgcagcaagttattccaatcttcaatggtgaatcgtatggcttttggaaaatcaagatgataaccatcttgaaaacaaggaagttgtgggatgttatcgaaaatggaattacgttgagttcgtcgtctgaaaactcaccggcgttaactagagagcgtgatgatcaagtgatgaaggatatgatggctcttcagattcttcaaagtgcagtttctgattcaatatttccgagaatcgctccggcatcaagcgcaagagaatagatggagttccaaggaagttcacaagtaaagatgattaatcttcagaccttgagaagagaatatgagaatctgaagatggaggagagtgaaaacataaatgatttcacaaccaagttgattaatatgagtaatcaactaagagttcatggtgaagagaaaaccgattaccaattggttcaaaaggttcttatctccttaccgcaacagtttgatagcatcgttgcggtccttgaacaaacaaaggatctatcaactttctctatgacagagatgataggtactttgaatgcgcatgagaagcgcttgagtctccgagaagaacgtatcaatgagggtgcgttttatggagaaaagcttggctcaagagcagaaaacaagcaaacaaaaatcgccatgggaagaccaacatgtggtgcagcgtgtgtaagaggaacaatcacaatgaggtagactgtttcagaaagaagagtgaaagcatttcacaaagaggtggaagctatgaaagaagatgctatgtgtgcgacaagccaggacacatagccagagattggaaacttaaaaaaggtgaaagagcacatctaagtagtgaagaatcagaagatgaagaagaagatgagtgtcatattctctttagtgctgttgaagaaaaagagatctcaacaattggagaagaaacgtggttggtagatagcggatgtaccaatcacatgtctaaagatgttagacacttcatcactttggaccgcaacaagaaaattaccataaggattggtaatggtcgaaaggtcgtgtctgaaggcagaggagatataagagtatccacaaacaaaggagatcatgtcatcaaagatgtactttatgtacccgaactagcaagaaatttgcttagtgtctctcaaatgatatccaacggatatcgagtcatctttgaagacaacaagtgtgtgattcaagacttaaaaggaaagaagatcttggacatcaagatgatggatagaagttttccaattcgttggaaaaaatctagagaagaagtgtatgcggcattcaaagaaaaagaagaacaaggaggagggaatgatctaaacgctcaaatagatcaaaatttggagggagcaatgaatgacgtgaagtggatagaagacatgagagaagagttgatgatgatagaaaagaacaagacgtggcaagttgtggagagaccaagcaattggagcagatcagttgaggacaagaaaaatacaagtggctatgtctttacttctggatcaggtgcattttgttggaattctagcaaacagaagaacgttgctcaatcaacgaccgaggcggaactctttatcacatcaaggttcgaagttctacgagaagagctagacgtaacgatgaagccatgatcaaggaggagtgttggaagtgatcaagtcatcatcttattttagaagagatatattatatagtgaagtaactggtttatatatattcgtatcacacatcgaagagatacaaatataattgttaactacaaaacagttacatgtgtgtatgtgtctctacattaggttgtcttctagagacgtgtcccttagtcaaagtgtgtcatgtaaacctataaatacagtttgtatatgtaataaaagtgtgtggttttcgttttataaaaacagagtgaaatatagagtaagacaaaacagagtaaaatctgtgttgtccgatccttaacaactttgagagttcaaagttctacagtattgtggttgctttgggtctattataaatatataggtaaacaatgcgggaacgggtataacaaagccgaccacagagtatacagcacaagattactcatttctgatggctacaaatctcgactcagcttttcatctctcacagctcgcgcatcctttgttgaaagcatctggttcagggagcatcgtgctcatgtcctctactgcaggggttgtacatatcaatgttggttccatctatggagcaactaaaggtttatatatactttaatatatactcaaactattaatgatccttttacgttctgaggctaacatataaatgagtattgtacatatatctacgcgttgtaggagctatgaatcagctagcaaaaaacttagcatgcgagtgggcaagggataacataagggttaattctgtctgtccatggttcatagcaactcctttagctaacattgtaaggcaataaaatgagaaaaaaaatacaaagatctccttaatactaagaaattttataacagatgaatttaacttatgccaaaatctcttaattagtatctcaatgatgaagagttaaagaaagaagtggagcgtaagacaccaatgggacgtgttggaaacgcaaatgaagtatcatcgcttgtcgcatttctctgctttccggctgcttcgtatataacaggtcagacaatctgcgtcgacggaggtttcacggtcaactgcttttctttcaagccagtgctttaaagcattgattgtttgttttatattgcatctatgtttcttcgtttactgtgtatttttattttaaaataaactcgcaatctctagcgtctaaaagtgagttgaacttcatcaagttcgtaggtaagaccaaacaaaactctataacattattacagaaaattccatgattattttctttgataaagaaaaataaaatgtgttgcatcaactaatttgagtcaaaacaataaattaatattgttctttgttattatgatatttttataacaaaacatgaacaagcctaaattgtaacaaaggaacaaccctctttagtacttttcttaaccacaccctaccggaaataatgtctagatctgctagtggatacggagccgtcatcatccatcatcaggaattattttattttcttaaacatgtgatctccgttaagaaactactagccagggatacctaatacatgtgtggtccaacggtcaatgtgccagagatgacactcagcttaaagaacgcttacgtaaatggcaagcaaagggtttcaggtcaccacttctgtctgcgacgtttcttctcgtgaccaacgagagaaactcatggaaaccgtttcctctctttttcaaggaaaacttaacatccttgaaagtatatatatatattataagcttctcctcctcgatcttgggaactacaagaaccaaattatgttgtgtttatacatatataggtcaacaatgctggtacgtttatactcaagccgaccattgagtatacagcagaagaatattcgtttataatggctacaaatctcgagtcagcttgtaatgatatgggtctaaacttgagatttttgtttaaggggggtttcttgtaaagtggtccggtattgtaaccatcaattgaataaattggtgatgtccaaatatttccataatatcaagagacagatgagcttagatagactggtcttgacggttgtgtaaagtaaaattttactgggagaggagtttgcagagaatattgcaccgaatataccaatgcggtgcgctggagagacagaaaaagtggctgcaatgactgcattgctgtgtctacctgcatcttcttatgctacaggtcatgccttctaattaaacgcttccagccttccaccaagtcaatctcaaaccggacaagaatttacattcgatttttgttatatcggtttcttaaaatttagtttgatacattcgatatttcaatgttttgtttccaacattttgaatgagtttgatgaataattcaatgcaatttatctttgttttacgtttgttataataatgactcttattagacccaatcaaagaaatgtaatgaaaataaacgatctggtctcttttacctgtagtctgtagatggtagaaataatttaggaaactgacaatgaaatatgggttgactaattaggccaactagctaaaagaatgttcatgtagtaatatttaaggttctttacattgaacacaaaaagccactatcatatcgtgcaacgttttacaacataaaaaatcatcataatgtggaatttgagatgagacaaagttcaaaacaatcacgttcatttttttatttcttttttggtgttaaacattctcgtaacattctcatggtcaaacctgacacctagacttggtcatatgatattctctataagactatactcttcactgcagaaactgatatccagaaatggctaaagcaggagaaaactcgagagacaaatctagatggagccttgaaggcatgaccgctcttgttacaggtggctccaaaggcctcgggtcagtcccacttctcctaccttacttatgttttttactagctagttcaatgttttttttttcatttcaatgatatattttgtggatcttttgatggtatttggatgtttaattaatcagcacaaccctgacaagaaaaaagcttaatgatggtattgcatgtctactttgtatagagaagctgtagtggaggaactagccatgttgggagcaagagttcacacatgtgccagagacgaaactcagcttcaagaacgcttacgtgaatggcaagccaaaggatttgaggtcaccacttctgtctgcgacgtctcttctcgtgagcaacgagagaaactcatggaaaccgtttcctctgtcttccaaggaaaactcaacatcctcgtaagttgatgtatatatataatagcatagaaaaaaatcaagtgattttgttgtgtctggtttaagtctatatatacacatataggtaaataatgcgggaacgggtataataaagccgagtacagagtatacagcagaagattactcgtttctgatggctacaaatctcgagtccgcttttcatctctcacagatcgcgcaccctttgttgaaagcctctggttccgggagcatcgtgttcatgtcctctgttgctggacttgtgcataccggtgcatcaatctatggagcatctaaaggtatatcatatatgtatacattcaaacaattaatgatgcatggcgttgttatgagacttaactagctaatgtatgttttaggagctatgaatcagctaggaagaagcttagcatgcgagtgggcaagtgacaacataagggttaactctgtgtgtccatgggtcataacaactcctttaactagctttgtaaggaaatttgttatcataaataaatacaaagatctccttgatgaaaataagaaaaatatattactatatagttttaacttaattgaaaaatctctcagattttcagtgatgaaaagttaagaaaagcagtggaggataagacaccaatgggacgtgttggagaagcaaatgaagtatcatcgcttgtcgcatttctctgttttccggcagcttcttatattacaggtcagactatctgcgtcgacggaggtgcttcggtgaatggcttctctttcaagccttagagttaaagctttgattgtttttttttgcttttcttttggtttgatgtttcttagtgtttgtatggtccatgtaatttcgttatgatgataatgtacgatgatgtgtattaagagaaggcaaactgtttcttttgttaaatctaaactaatttgatgagaacctcgctatcaaacaatcatgatggtgtttcatgtttagagaagagattgatctatcatctgcgattgttacatatatcatatgtttcttcttgtaaactagagcaatattaaccaaaaaaaaaggctaaaaattatagaaacagaaaagaatttatcgtgaaataaactgggattgttctaaaaagcattctacacattggcgtaagagccattctttttgtacatgtgaaaggaaaaactctaaaatcctcaccatttttctttacaccattctctgccttttatctcactcactcatcagcctaagggggatctttggttctatgtatagtcaaaacggtaagaaactacacaatgtacagattttgcggagaacaaaacaaagctctctctcattatttctccgcagatttttggtttagatcttacctaattctcaaaacgttatggcagagccatccaccctagttaagctgtacaacacttgcggccttacgccaccagaggctggggtaatgactgcaaagccattctcctctctgcatataagaacaaccacttagagacattgtaatgcgatagaattgattatattgtctctctctagcttttcgaatctcaaaagcagcaaaacaatacggaaactttggatcgtagaagggaaagaacatgagcatacctccagcagcaacgagtttttcaacacgggcaacgatatgctttccgtaagtgtatttctttagagcattcagatgcactttaatacgagtcagtatcagttcacgctgttggtcatcacatgtctccaggactttttgcactacatagtttgcaaactgatccttcatcatcgcctatatacacaagaagaaacttatgagcttattagattctttgttcggtgttcccccagaccatcatctgaaagcatgtgtttgacaaacctgaagaggctcgttttcatcagttgtgcccagcatctcattcaccagcaattcccgttcctcaggacctccaaaagtcaaacacttctcaacaacgtttgatgcaaacttctgttggctcatctgaacaatcttccccgctaactctttgattatcacagtgcgctcatcaggctttccatgctccagtacatgctgtacacaaaacatgtatcagtttagatcaaccaataaaaaaatcaagagttgcagtaaaactcatcttttacaaacctgaacaacatagtttccatactgatcttgggtcagcatactaacagtggacaggatttcttccataaccttactctgtgtatcagggttatggcagtgttccaatactctctgcaacaggagatgggaaacagttttacatagaagcataagatcgaaaaaggtgtcatatttcttaatcaccagtaggaagaacctgaataacacggcacccgtatgggtgagtggagagggtcaccacatggccaaagaaagttgaaataataaactcaatgttttcttcaggcacacattcaatacacttttgaaccacatggttcccattctgatcacgtacacatcgcatcacatgtccatcaagttctttgaccatttggattttctggtctagatcaaccacctcaattgcctaaaaagttaaaaataggaaactctaactgttcttgagaatggaaaatatacttatagcgaacattaaaacacgtgagaactagactttaccttctggatgacacgacaaccatacatctgtaagctaagaggcaaaacattgtcaatgagtttctctcccaattctcttctctgtggtgggagtccatgctcaaagaactgtaggaagataagcaacatccaggaatctctcatgttactatgtctcactctcaactccaaataaaatcaaagaggaagactaaataaatctataccttctgaatcacatagtttccaaaaacgtcagtcatcagggcaagagcttttggcatgatctcctcataaaccatgtttttctcatcagttgttgctgtctcgagtttctgctgaataaaccggcttccatactgatccgaactggtcatgaaaatccccaagtacgcgttagcttgggacaaagtgtacacaagaaaaaaggtaaaagaatttaaagggaatacctgaactctacaacatggccagctatttcagaaagttcgaaccctcttgttttgttacttttgaactcttcaagcattgaagatccaaatccttcatccaaactagcatccatgtgccaagaacccattacccctccagtatagtttcttgttgcagcgggatatcgcatatttacttcacctcgtctcatagggctgtaaggtgacataagagagtttggcataccatgatgagccaatgggctgccaggatatgacatattagacccaaatgttggactgccataatagctatggctgttagggctccctgatttgtaaggaagaccatactgtgatttctgagatccgagataagccctctgaatttcaagcatattcatgtatgaattaccatagttcctgtccattgaagggtcattaagaagatcaaacgaatcagcattttcagagaaccttgcatactgatgatacatcgggtctgcaagatgtgacgggtgacccgtacctccttccatcattcgattaccgaccctgccaatatttcgtgattcagagaggttttgaccagaagaaacaaaacttccaccatgaagtctggagtccattgcagaatatcccaaagtggcagaagcattttcatacattggagaatagttattagttccaagttggttagccatcatagaagctacagctggatttaatgcgtaatagtttgggctatcatgatgctggtaaggattagctactccacttccactattatatgcagatccttgtgaccctctcatttgtgaattcctgcacgaagcagttcccctagcttgatcagatctgtttgggaacccatgtggattgacttcattatgcccatcttgcagtccaaacatatagttcctgaccttttcgacatcttgctcagcctgaccacgttcatctagcccgccagtgcctgacaggttcaagccggataaagcattgacaagatcagaagactcgttgagaccagatgtaacaccgttgaacgggctttgattacttgtgttcctcttatcatttgaactcactcttccactgccaatgggagtaaggcaaggactaggcaccctagcaatgccctgtggatctggagttccatttctagacaaagatgaacccagaacagctgcatagcagtatggagatggcgctccaatgccttgtgatgcagatggagacaggttattattagagtcaacattctcatcaaaggtattacgactagcaggacgtgagggctgctgtacaacaggatgccccatatccgcctacacaaaagtaatccaccaagtttatataagcaagagtattcaggagaactatacacaacacatacacacagagaaacattagcagagtatcaaaaaataaccaacctgaaagatatcagcaaaactcttctgcttgcctccaagtcccaaaccaatcaatccattagcatcccactcagaagcagaagcaccaggttttccagcctcaaaaccaggtggcatagagaacaaagaccgactgtcattcacttttctcctatccccaacaccacctaacacattattactccctttaagcctctgagcaaccctcaaatcctccctagacatcaaaggaggtggcaacctcggattcaacttcatattagcatagtaataagacaagtaagctggatctttcctaaactcctcatcatcaccaccaaacccattacccttattaactccaccaaattccagaaaagaagccccacctccgccgctaaaaagccctccggcagcactaagagaaccatcaacagtcggtggagcagagccacttctatacaagttaagctctctctcaagctcatccgcctctacttgccttctctgctgctcaccaagcaatactccaatctctttctcgtaatcatccccaaaagatgaatcttcgttacctctatgcatcggtcttctccctagttccggtatcatcatcacctaaacaacaagaaacccccaaaatcaattacgctaaaaatcctaaagatgacacctttataccccaaaactaaacccaaagatcaaaactttaagctagtactcaaaatccaatctccatgtattactgtcgttttcaattaaaaaaaaaaaaaaccctaaacacaatgatcagatgatgagaaatagaaaaatcgaaactttaagaagaaactgggttttatagagagttagaagaaaaaaatcgacggcgatgtaagaaacccttagggtttttgtgaaaaaaaattttaaaaaaaaaatttactgtgaatcattattagggttgttgttgttgatctgacctagtgattgcataaggaattgaaaaattataaaaagcattaattaaaaaaaaaaaaacagagcaaaactttaatattgtcttttgtgtttcagagagagctgaggaatctcagactcacacgtttggagctgtttcgagttcttctgtcttctgtgtgtgtttcagttttgggtttaaggacacagctttaacaaagtacaacacttcaagattctatgattattttttctatttatatatacttataattttggatatatgcttatttcgcgagagaagatatatacgtaaatgttaatattctttataagaaaatatactcaaagatcttcctgttgaaatttttttaaaaaaaattgtaatctaatttttcatcatttaaattggattaaaaatgacataatttcggtatttaatacttaaaacatgaattgttacaaactgttttcattcaaactttagaatgtaagctatttagtccagctgtgtttttttctgactagatattaatggaatcatactatttctgtttttctgtttttgatatgattcagattgattcaccaaaaacagaaataaataaaaggtgtgaaactctgaaacaaaaagtccatttgatttgcatgttctctctgcaatagtatagtttctttgttataaatgctcctttttgaagtaaaatcaaataccaaaaggtaaacattgtgagttttcagaaaatggaagttttttttttacttggttaccacctactatcactgttcatcttttaatgtatttatttcctaatttggaggttaaaagttggtcattagtcaaacctctctctttaaatgtatcaatttaatggcattatttgtaactattccggttaaaatgttgtccataacggttagaatgagagtaatgcgattaaattaagaaaggtatctttgagtctccgatcgtgcttggtcatgattgccctccgaagtccacgagtcggcgtgcgaatcggtgttggtctaaggacggcaaaatgaaattttgttaggctttaaattcatataatgggctttagtttcaattttattttatccattttgtaaatttgattagttataaggcccaatgaattcggccttataaatcgaatttattcgtttgtatacgtatggtattcatggttttggtccttttggaagccaccattcttatgattagttgaattattcttgtcaccgactaataatcacattattttataaattcaaagtcaagcgttattataatggctaaacttacacgctgaaacactagaagagaatatattttttgggtgatatacctattgatcgaatcatgagttggttagtaaattgtgtatgatcaatttttcgtaaaaccaatttccaaataaagtaatgataattttctctcaaaaaaaatctcaagaggatttacaaaagcacagtaaagtaatttattctttcagaaaacaaaaagttatgtagttacaacttgttaatgtttattggatacaaacataaatgttaaaaatatgtaataagtaaaggaaagggttgaagttggtaaacctacaaggctacaactaacgaccaacattattatgttctttcttacttttagtaaaaccatgtttctaaatttctaattcctcatcatttaccagtatcactttagccttaactaataccatctcttgtttactagttactttctgaacttatattttaatttctaaatttggttgttagcaaatttagtaaacattcacgagacgtgtaaaaaaaccccaaaaaaaagtatattttaaagaaatcgaaactcctcaagaatttggtgccttgtttatttgtacttactatacttttctcatcgtgaacacacaattttttttttatagcttagattcatttcatcacaaactatgtgcaagttattcatttgaagtaatcgatttttaagtatcgtctaacaatttactcgaagctaaattcgcaagaaccttcttgccacctattaattagatatttttccaaatcatatagttttttttactttttacattcttttcctactatgagcaagacaccaatcttaacttacatttcaaacattcctaattaagttcgatgttttcttatagtcagatgagataaatggaaatgaagtgagtaatctcaccaaatttaaacattgaatgcaccatcttaattctaaagttaccaaatatctagagaaaaaggagatgagacagattaacagtagatttgccaagtgaagctgaatccaacgatcgttgtcttatgttgcttgaaaggaatggaataattgggtaaagtgtcaaagagagagtcttccaagagactgtgaagatccttaaagcttagattcactcaagactctcttttgttggaacatatgttttcaaacaaccaacgtacacgtcccaatcctctacatcatccctgcttactataatatatcactgtactcgttatttacttatcttactttggtatcgccacatatttatataaaataatatttgatataaagtttacttctctttcgaagttttgatatccgaaaatttttcaagtaactctttaacaaaaaaaaaattcaagtaactaaattaaatttgagatttttaattgtttgaataaaaatttgatctaaaatgatattaatttgaaaattgtccataacagtaaaatttcataagtctttttgttcaaaagtaatcaagtaatcttattaaatttctaagcaaaagtttagtcattttattaattacctcaataatatgcattatactaaaacatcagtcccttttcttttcttttcttttttgtcaaagaaaacatcactcccttagaaacagatgggattatttttgttgttgtctcgactagcgattatctgttcttatatatctaatatatatttttaataaattaatcatttgttggtacgaaagcttgtatgtagagctataatcatcaaagttattaaagcacacaattagttaacttggaattc

SEQ ID NO: 305 - DNA, 90665 bp, Arabidopsis thaliana
aagcttcctttcaaatgaattaccatgcatctgcaatgtttccacgcatattattagtgaaagtatacacaaacccaaaacttgaaactaagtagactactatcaaaacattttggaatttcctaacgttcggtttgaggtgacttcaagatgggaaaagatttcttacgtttgccttttcaggaacccactcaaagaaacgggtgaaaaatggtggctcgtggccttctgtgacaacatatacaggagtcctcatggttagaccttcttccagtatatccatctctaggaatttctgcaatctcataagtacaatggactaagaaacactgaaaaaggaagccatattcggtaaccccgagttcgccattcttaaaatttatttatgccatatgatgttttgatcccatttttactgaagttccacccgtaaacagcaaaaaaagcacttggaaggccaaacaaagatgaaaattaccagaccaagagtaagagcttcttccttcgactttatgtttgagtttgatccaatccagacatatacttcactttggcagtccaatagaaatacatcttcagtagttaaatcatcttgcacaaaattgtatatttctttcacctgaaaatcatgcacaaagtggctatcagataagagtattcattcccagatgatctctaatcactttaaataatagcatcaatacacacatgaatagtaccttgagtacatctgaacagaagagccaaagtcgtggaccactatttcgttaatttatagctgaaccaaggcagaactaaacaataatgtaagatgataaaaagaaattgaaagatatttaccattacctgaactgcatgaacatgtaaataaatgtggttcttctatttgttttctcatttccttttcttttgggtactctgacttaccaccaagcaaattccaaaatgtgtctgtttcatttccttccctgatgtatataggttgacaagatgtctgcagacggaaacgaagaaatagattttgttactagtaatactgaacataacccttaataaaccagaatcaatgtatggcatgaacttagtaaacagcagctgagagctaaaagttacttacatcaaggaaatatagcattctgtcaagaacttcatgatcagagtctgatgaaagtttcccaatccaagtgaaggcagaagctccatattgtaaaatgtaagagtaggatgagttcaaggaggttgcaacctgcggggggacgattttcatttgcttaacaaatagtgaaaggtatgtaagagtagtgaaagtactaaagaacccactagattcacttggattgcttgcatgtttcttgggcttgttcctacaacacggaaaagagaagccttgttctcattatattcttcccctatcttttccttctctgctagaagcactttgtaccgtctactcaaaccgcccttaaaaacaaccagtgactggaacattggaaaaaaccgagaaggttcgtttccctgatatatatgacactggataaagaatgttgaatgaaacaggtcagtaggtttacagtcttgaaccaaaaagaaaagaaaagaaaacgtgtgatttattttttcggccctggctaggaactaaccagtacagattcacccttggttgtaccaacaatggcactagcattggttatggcatcagctctatcttgctgcaatgaagtcaaaaaacagaatgaagttcatagtggaacaaagaaaaatatgaaaacaaaaaaatgtcaaagcctatatagcctgcgtacctgtatgctttcacaaccgatccatacatataaaagatgttcggttctttctttataagtatatttatactgcacaagatagcaatcgccggtgaatagctttgtctggtcaggaatagagagaagcgagacgtcatcaccatctacacgccaaacctgaaattagttaaagaatcccattattcaggcttatgctcagatatgtgacagtttggtatgaggtaccttgaggttgtctcggcagtttgtgtagagagggtcatcttcttcatcaggaagctcctcaacgtcatatcctttttgtttgaacaacgctgcacaaaagtattcagatttttactttagtatctttttgtttcttaagcaaatttttttatcttctttacagaaccagagaaatatgaaacagaccagccactttttctcgaccttcattgtagaggctagactccacggtctgaggccatttgttaaaaaatgacctgaatctggcattttctagtccttctgttagaagtactaaacttgtggtcgtcgagcgtccctcctttcgtagaaattcctagagcaaagcaacatcatatcatatattaagaatggcctctcagatgctctggcagaaactaaatgaaacacatgcgaaacgacaaattaagacaccaaagtcatgtaaaaatgttatattaccaatatttacttacttctgaggaagaaatggatgtcttcctttctgtaagtgatgtgtttcttcccatccaaacaaatacttcactgtgacagtccagcatgtagcatttgttcttctcaagcatgtccttgtccaaagaacttgttccagttggatgtagatttcccttagtatctatcctgttaatcaaagatctttagatgattaataatggattaacagcaggtcctcaaagcacaggaatttcggcttttactgctaaatgttgaaaagaacaaaaccattgtgagtatataaagccaattctcaccagaacaattctgcacatggagtctgagtttgttcttgggtggtagaagatgaaagcttgggaatgggagcataaccaccaaagaaagaccagaattccccagcatctgaatcacctgaaaattttccatcctctacaaaaaaaccgaaatgatcagctgtcgcttttctttcagtcatttagtctaaaaagaggagctcaacatgaaaaatatctaaccgatagtcgcgacctcacatcttccgtcatgcttgttatcctttatatattccacaacctccatcgctttagctttttcctgagtgcttgagttacaaccagcaaaaagaaaaacctttgacgcagtatccagaatgaagacatcgtcatggttcagtgatgaccgaagaaaaggcaccttgcatagattgaccaatcaaagtcagcttgaagaatgtaaataaactgcaactttatctttttgcttcaaagaatcctaatgcaaacacatattacctctttaacacgaacaacatgatctcccttgcaccttagcaaggtgacttggtatgtctcgccagcaattccagtttttggggaatacttgccttcaacaggtataatacaaggtttgaagtaagagagaaacttctcagtctcttgaccttgaacttcacggtattgcaccgtacaacatccaagtgcggcatctaaatctaatgctttgtctgatgccaaaattgaatccaccttcatgtaaaatgggcataacgatctcaaaacaccagattttcataaccatcgtataaaatgtacattagtgatcatacaaacctcatttgcatcaattcctagccaatagtgaatgtcatactggggagattcgatcttccgcaaaaacgtctacatatccatgagaaactaagtatcattaggaacactaatttgtcccaagtagaaaaatgaagtgagagaaacagcttactctaagaacaaggtatgcatttccagagtgaaattttccaaaagaagacttagggatagaaataagctgtttattataaacgcaccaaatctccaagccactatacccaaacaaaaatggtttaaacacataatgagaaacaacaaaaaaaatgtccatggattctaataaacaagtatataccttttggttccaacaccttgaaacgctgaatcaatgtctttacttagcctagacattgtttgctttcatcttcctcaaaatccaacaacagtgacgcttaataaaccaatcctgcaatttcataaaccaaagagtagagagcaaacattaaatcaccaacaaacaatgttgttaccagagataaatttgcatttacgttttcttaagttgctgcatatgcaatcaatcttctcagattttcaattaatttttcaccgagaaaacaactttcccaatcccaaccacaattcaacccccagaaagagaaaaaaaaaaactcaaatcagttaaaatctccaaacaatcgaaaacaacaaaagaggaattagaatcaattgtgaagatgaatgttaaatgcagaatactcacagggatcaggcatacgaaggagaagaaaaatagcgattcaattggatcgtcctgattcaattgtgagagagaggaggagtttcgcaaaaagcaataaaggaagagagtgtgtgtgccaaacggatgaagaaaataattattattagtctgcaaaagcatgtgggtcccaccaaatttcaaagaaacaaaagggcgcctttttgtcagaatttttgttggatttgcttctttaactttcagctttaaacgacgccgtgacagaaggtcaatgtcatgttcatatataatcacaatctcatcatttctttgtttcatcattttatcttatattatatagatttatatctaaatgtacatatatgttttcttatttggctaagataaaacttcttctattaatgtcttctctaaagttttattgagaaagtaaaagtttatatctataattgcattcaaagaaattcataattgatttagaaaagaaaagaaaaaaaatcaatcaaaatttaatgtatataatgtaaagtgaagacacatgtatgtgtattctataacactacattttttttattagtcccacacggcaaaatgatagtggcatgtgactatctttaggacattggtaaaaataactggtaactagtctttcatgctaaattaagtattgttttattaagggcatcgaaaataaaaagctaattaagtgttacgacgaatccaacccaagcgttcttcaacagacatgctcacaaatacgtctttcaaattcaatgtgtggatcttggtcactgcatcatagcggatgtgatcttccagatccgggatctccttgatagcatcccaaacattgttcttttttttctcagtttccctaaactcaacttctctttgatgtctttcttctctttgttgaataagatttatgatgttagtgccaactccaatcatttcagatagcaccttctctgaagactcaccatgatttattgaatctgaccgatctccgttacgattagttttagatcttttcctagtaggcagcttttctttaggaagtgtttcatttacctcgtcgtcattaatctccatatggttcacattatcccctgcttgaagatcatcttcttcttcaaaagtttcagcatttgaatcaccaccaagtccaaacgcgttgtttccctttgctatagcactttcgaaaatcagttgcaaatcctcaaaatcttcgaaagtgctggttcgcatgtgatgatgatttggatgcccctgagaaaatattatatatttattagttatcaataatgacagaaaatatctaaatttggtgaagttaaccaaaagagagttaccatcaaataggctgcccacacatcatctggagctgtaaattgttttgtgatgggatcccatccaaaaccagaactaaaccaaaaaagtgcagcatacacagaatactcctttttcatagacttcattcgacttaaataatttgtgtaagtcttattacatttaaactttttatttagaagaggtagtatttttctctctaccgtagttttgcttatggtaccatttttgtcacgccagcctcgtttgatagcatcaactaatatagccgttaactcataacattcttgatctgaccatgacatatatgggcctttctttttcttttttgacgtctctcctgcctggtctcctgattccattctaaagaaaaaaagaaaataaaaacataaagaaatctttcatatggatcaagagaaattgtagtgtagattattatataaaaatgcatacgagaaacttacgaaggatgattatggtttttcttcaaactggttttaggagatgatctttgtttttctttttgagaagtgaaatgatcacaaatattatataggagaagtaagtatataatactacttttttgggattttacgatagacaataatttatctaacaacatttcaaaagtatctaaaatctagcaacaacatttttttctaacaaaataggagcatatccacaaagaataatctgtcgtgaaattagaagtggaataaaattagagcacggatacgtgcaaaataaaattttgaggtcccctattttgagcaagtgatacgtttcataaataaaacccatagttaattttattccaagaccaaccagacgtggaataatctgtcgtgcaattatacattgatgagaaattactgaattagttgtattaaagatggcgagaaaagctaacgatagtttcctccttgaagaatggttaagaagtggaagcaatgtctcaggtgatcgtgtaaacactcttcgtatccatttagaaaaggaaatggatcgtgtaatttcaggaaaggcctttgcgtggcattacaatgagagcaacgaacagatttgaagatgcaaggaggattgaccttaaagattgatctacgtcatcacagaggaagatcggaaactcgtttatgagaagatcctgtcttggagaacttaggctctgcgtttggtattgacggtaacattttatgaatcaaggcccgagagacggcaccaagtgttggagccagcaagtatatccaaatccctttgtaacatccccacacaagtgcaggtcctatgcttcttgctggattcatcgatgctcctgatacctctctgtaaaatgaaagtttggattgtcccattggttagccacaaagattcttaccattgaagaattttaacttgcagagattgagggggaaatgcgaaacttacccaacaaagataacattcagtgtgacggttgccccaatgattagcccctctagttcctctgtctgcaagattgataaatgttaagattgaaatttatatatcctctgatcatgaagtgtttttggttgttgatcgccaacagttctcttggtggttgtgacggcacagacgactaacatgaggaagccggtaatgatgaactccatcacgaatgcttgaagatcagacccagaaggagatgaccccgaggaagacatcgtgtttcttgctgcacacatcattgttcagattaaacagaagacgcagagtcgcatatgccaaggttgatccgatgacttgaacagttatgttccttctctgtcaggagacgtgaaagtcatgacaacactgtggttgattctcgatcaatcccgtcagatggaaagagagactcggctaatgagaagaagaactttttgaagttcgtacgtcctatttgttttccatcgaaatcataacataaaagctcataattggttctatagattttacactagtttttctattaaattcttgtcaaataataatgtcataaaattttacataacattgaataacacttgaatttaatagaattaagaattcaacaagttgaataacactagaattaaaagtattttaagagaatggttacaaatacttatttcaataacacaagaatttaatagaatctacaaaacgtcaaaatgaataacactagaattgaaattctgtttgattctattaatttccttcatccaataccccccccccctaagtatacatattttggttaacgaactgagttggaaagaaaaaaagggttaaacgttctctcaaagtcataaatttaacaaagcacttccaattgcagataaaagatagttttggtttctgagtagaacaagaaaaagatttgttaataacacttgagtagagacgtcgtctgactcaatatatatatatcggtgattttttttttgtgagaaaacgtaaaagacaagaaaagaaaaattagaaaccaatgttacataaaagagaaaagaaaaatgtttttgctgatattgtttaagcaaaaaaataaaaaatatatatatatatatatgcaaatgttagagtaaatttctttgaccaccttgttttggagaaattatatatatatgggaaatttattagagtaacccatattttatacataatgaccccaaagggatgctaaaaatatgagttatttgagtaataattatacctaaattatccttgttttcctttgcagagaaaaacaatattacagaaatgccattactatttaattccagcaaggcaataaaaccacatttatttacgaaaatgccatcgtcgtttttggtaaatctgtggctcttgttgcgacggatttgttatcgatcacagatttgttggtcaaccacagattttttacaacagacttgttttgtaccacagactttactgtgttatgttacgccagattttttttttttcgcagattttttaactatgactgatttgtttcatataatctccacagattttatttaaatttcaaaagtaagaatgttgaaaccaaatctgtcactgatttgttttccggaccacagatttttctttatggtggcaacagattttctatttgcacccaaaaatctgttgtgttataacagatttgttaacctcgaaaaatgttatataggcatgacagagttgttttgtgtaatcacagatttaattaacttgttaacaaatctggtgttttacaacagatttttgttaaaaaataaaattactacacagtcacatagtgataacagatttgtttttagtgatgacagttttgtttttcagtgtcaaagcataacagatttactcatgtcaatgttatggccgatttgtttatgactagaataacctttttagtaataacagactttttttggcagatttatttttaaaatttcgaaattttttgttatatgagatttattagctagccctcaattaaattatttccggtctgattgtatgttaaatccggtttgactggattttttttttttttgaaaaagaaattttcataacgtcacgacagacttttattaatgtcggcagatttttacataatattgtcatatttgaattttaatgaattttattagtcatgataaattctccaagggttttcataaccgttttttttcttcttctattcctaccatcaaatcaattatttgtgaattgatacatgtcaaaatattattggtaagctaaaacaagtcaatttataatatgcaatatcaaaattaaattgtttttctttagtatttttaaaatcaaaaacgaaatatgtgaagaagattcttctttatctaaattttgttcaaaattattattttaaaaaaagtttgttctcacgataactggattttcgtttttgttttaattatgtaatataagttttggttttcttttttatccaagatttcttttttgattttataattctgttgaaaaataatttggttttgctgatttgtcaaaattttattggtggagtgacttgtgctttaaaatataaaagatttgttttattttttattttttgttttaatttgattacaattaatcattaaggttatttcgtctttttaccaaagatatgggttactacagtttttgaaaccaaacgtgtgtcatttaaattatttatgttaagagttgagtcaatctaagcaaatcttactatatatatttccctggacacttcttcttaaaacgtgaaaaaaaaagtaagaaaagcactttacagaaagaaaaaataatgtataatgagacttaagaagaagaaaaatgatttaatacaaattatctttggaataaaaaattaataataaacctttttttgaaatgaagtttctgaatgcgttgcgtgcaatgaaagagacctagctagtgaaatgacatattggtttccttataaatacattgttcacaaatatcgaattagtctctttttcagttaattcgctgctactaacgtcacacgctgcgatggttctactctctgaaattcccggcggctctaatggcgacgatccaaacatgaatcctcaagaacttccagaagaactcatcgaaagcattgttgcacccatcccaagatgttattacccgtcgctatctctcctctccagagcctttcgtcacgtaatcacttcgcagcaactcttcgtaactcgctcgggcctcggttttaaggaaccggttctttatgccttcatcggatgcacaccgtatactaccccaaggtggttcattcttcgtcggagcaacatcccattacaattacgcagactcaattcacttcctcatatgtttcctggagcagctgttgtcacaatcggatacaagatctacgtaatgggtggttacaattatcaacccgtatctactgtgattatcatcgactgcagattccatacgtggcactatctccaggatatgcaaagagctcgttaccatgcaacccccggagtaattgacggaaggatttatgtgatcggaggacgcaagaaacaagatgctgattgggttgaagtgtttgatgtgacaactgagagctgggaaactgtgcctactcaatgccctaacgaggctagtgagaatggattgtttgttacatatgcggtgatgcagggcaggatcttgggcgtgtttttgcttacgaaccaagacaaggtttatggcagtcattgggagttatatgtcagttgatgagattttggggctcgtcttcttgtgtggtcggagatttgttgtatacacttgatcctacgtgttcttttggacatccgatagtggtatataatccgaatgaattggtttggagacctgtgtttggtatatttatgattgatttgcccgttctcagtttttatggatctaagatggcgaattttggtgggaagttggtgattttgagcggctattcttcttggtggttatttggtgcatagagattgcgttggagacacgtcccggaggtcatatttggggggtggttgaatcagtctcgcgtgtgtttagaaacgtgatcatgttgccttccattaagctttgtcgaactgttatggtttgatgacacgcttgcaggtatgtttttttgatgagtttggactattgatgtgaattattatgatgtttcgtatattttctttagcctcaagtcttagttagactttcacgatcttgcaggtgaaggatcttttatctactgttttagcagcttgttgatatgaagtaaaagtggtgcagaagttgttatatctgacaccttaaagagtaattcgttcttcttaatctttatgcaaaaatgtgaatactcttaacagaattagccttgtgtggagttggccactcttttacccttttatacaaaaatgcttacgagacttgttgaaatgcatctttagtcttttgggttttcttgcactacgtatatggtctcaacttcttccattgtgcttttagatatataactcttgtgtaagtaagctgattaatctacactttatactaactaatgaacctaacctgcctctactatatgagcaacattatgaaatattggtttagatatgaagtaaatagagtgattaacttaacagatggttttgattttgtgggtaactgtctacgatatatgatatgaaagtgtggaaatacaaagtcctgatcaaggctgaagttatctatatagaacgtaacgtataccaaaaaagaaaactctgttctcatttttaaaagactcactttaaaaactctgttagtgattaaaactgtctacgatatataaaaactctgttaatgatttgctcctctctctgatattgctcctctctttcagagaccacgtcattcatgttgccttttggagaccatgctggttttgagccattgttagtgtgctaacacataagtgaaaagagagaacaagtaagataagagatgacaaaagaaatttgtagtgttggaaaggggtgttgctacttaccactatctgaatggtttgaagcttcagattgaacaggtattcgattcagtggatctccttgtgtctgcattgcttcttgttcctgatgatgctgttgctgcggtattactccttgcagctcgttgctgtttgctcgatatttaacttcaagtctttgcagctcttctactgagaggttctgttgcagctgcgattgcggttgacattgtccatataggtcttgtggcggcttttcgggtggccttactactccttgaagcccgttgttgtttactttactttgaagtctttgctgctcttctagtgagaagttctgttgaagctgcgattgccgttggcattgttgatatagctcttgtagcatgtcatcgggtagcgtttgtagtgcggctgctaaaggatctggaaatttgggctgctattgtcaatatcttctccgaaaccatctctaaaatgatcaaatgccgcagtaggtgcttttgaaagagttggacctccagtatctaagggaaagagaaaggagaatgaatcatacaaatgcttaagtagaagagttacaaaacaatataatgagaaaggaagattaataaagtatattatttacaagcaaaatcagtagatgtcggccattgaatagtagctgctggtgcagcggttgaatatagtactggatagtaatctatggagcaaaaaagaaagagtgattcattcaaaatctttgatgtgaaaagggtttaaactatgagcgataaaggttgagtgttttctttacacgcaggatcagtatatggcaacaattgaccataagcttctggtggaacggtaggagctccaagactggaacctatggagaaataaagttgagtcattcataatagtgctgaagtacaagtgataaacatatgagagagtaagagagaaaggttgagtgttttctttacacgcaggatccttataaggaaaccattgatcgttagctgctggtggaatggtagaagctccaagattggtacctatggagaaagaaagttgagttattcataaaaaaattgtcaagtactagaagtgttaaacaaatgatagattaagagagaaagattgagtctcttctttacaagcatgattatttggtgtagaccatagatgattttgctgaccattaggaatcggcaactggtttactacaagacagagaaaccaaaggaagctttagaaatcaaaagtgaaagatataatcgagtttttgcccagctgcaatcatgacctacaaactcaatattcagaaggagagaaaggtttgagtcttttcttacaaggtatatgattagttgtagttgaccaccgacaagaatgaaattgatattgctgatcattaggattctgcgactggtttactacaaaagagagaaacataagggaattcttacatgtcaaaagtgcaagaaatcgagttttcgactttacctgttagaccatttgtatcatccaattccgacattgcatgtttaaagtgctcaactctgacctatcagctgcataatgcaaagagttatcaaacaaagcagaacaaacccaattttcaaaaaactaatgaactttatttagagattttagtccttgtgttatacgtacatgttgcagtactaatatcaagatctccattctcgagcatcagagaaacttgctttccaagaaaactgttaaacaattttatttgacgcgctaattcacgttttaagtggtacttgttgaaaaaatctgcattctctttctgaagctgctctcatactaataaaagaaacaaaactgaattttttataaataagcacagaatcaattcaaaacagaaaaagagattatataacttatacttggtttggtgagatggtgactaatcttgtgattttcctgcagataatccactgtttcttccagactcatgtacttgcggatacatgtctcgattatgttctttatctgacacagaagaataacaataatcgtaccatatgagacagagtagataacaataactcataaagaatgttttagagatttgtgtagaaagcatcaatacagtgtctatggtctctgaaacgttacgacgactacaactgtagagaagattgagacgacatggttcgctcataactttggagggaacctcacaaaaaaataagatatgatctctttcaggaacgaaaggttataaatatacaagattgaatattcacttgcgagaattttgttgtatgtcgtatgggaagttaggaatgtgcgaaattctagggaaaatatcaaaacaaaaatattgaaacgtcgtcgtttgagatgacggagagagaaaaaagaaaaaagacaaaactgttggaattgtatccttgattgagaagaagtggttcgatgcgtggagattcaaagcaagagggagatgaagaaagcaagcttacagtgagctgtgctaatgacgtagaagggattcgcgtaaggaagagaggcgattccagagaagaagaagcaaagggattcaaatccctaaattggaactgggattttcaaagtgagtttctttatttaatcaaagtgaatttcttttaccaattatttttttggaagaaaaaatatatataatattttcgataatattgaaaatatgagtaagtgatgaagaaaaacacattagatgctaaagagatttaatacattaatgtattagaaagagatttaagaaaaaaaaaatgatttattacaaattatcattttggatttttatttctgttgaaattatcatgtattcctaatcacaacattaattgaaagctaaatctctaacaaaataacaaacaaaaaggaaagtagaaactaaaaagattaggaaaacaaaattataaaaatggaaactgatatcaaatcccaatagtattagattttctactaaagttatatataccctcgatctagcctctctgttataattatatgaatgatttaattcaagagaaccctatataataggattaggtattcaactgacttgctttttattgattcactaactatcgtatttatacacaatgatctctattaagagacaaacataaatccctaaaatataggttagaaactctatcaccaaagatattgtactaatcctaatcggattacacatatccccaatagatcaggaaaaatcgctcccactgatgttttccatgtgttactagagttgtatcgattcgtcgatgaattaacttcctctgatgattatactccagcttgtgctttaagagtgtcgatgactcttaccaccgttattcctccagaacaaactgaagaagcagctccatctgatcacgctgaagaagttgatcaagtctcgctcaatgaggatctaggtttggaggttgagaacgatgccaactttttctatggagaatcatcttcatctcagcctggccgaggtgttccattctacgagcttccacacttaaggtatgagcacgatgttaacttttcttatggagaagcatcttcgtctcagctgggaggatttgttccatttcacggattgccatacttaggctatgagcaggatcctaacgttttttacggacaatcatctccatatcagcctcaagaagttctattccactggttgccacgctatgagcacgacttcgatcatcaaactgaggaagcgtttcatcctcagtttgaacaagttttgcaagcttcattcaatgagaccaatactgccaggttaaaacctgcgagcaagctcgctgttgagtctttaaataggaaaacatacaagaaggctagtgatgtcgtaggtgagaatgaaatgtgtagtatttgtctagaagagtttgacgacggaagaagcattgtggctctaccatgtggacacgagtttgacgatgagtgtgccctgaagtggtttgagaccaatcacgattgtcctctatgtcgtttcaagttgccatgtgaagatcaatgaactagctagtttggttctgtcaccggagtctttttccgttttgtacccatgtaatctcgttcgtaacgcccttttgggttttgtttttgtcaacaagctagtaattactatcatgataagattgatattaatcaaaagagttttgaaaagctacaattaagaagatctataaaaacgttaaatatatattggtatcattcatgtatatggttcctagacaacatctcttatacacaaaatgcctaaactctctcctgagtatacgacacaagctcatacatacaaaaacatgtaccttaaagagtacttcgttcttcttaatctttgtgcacaatgtgattactctgagagaattagccttgtgtggagttggccactcttttatccttttatacaaaaattcttatgagacttgttgaaatgcatcgttagcttttgggtcccaaattcttcttgtttgcttttagatacatatgacttttgtgtaattaagcagatcagtttacactaatgaaaccgaatctgcttttaatctatgagcaaaataaaatcttgatttagaaatgaagcaaaatgataatgtataacgaacgagactaaagaacaagaaacatgatttaatacaacttatatattcggaattttattttaaaaggaaataaaccttttcttgaaacgaagtttctgaatgcgatgagtgcaatgagagatacctagtgaaatgacattttggtttccttataaatacacaaacaacattttttcacaattagtctctctttgatcagttaattcgttgctcctactaacgtcacacggcggcgatggttgtactctctgaaattcccggcgatcctaatgaagataatcaaaacgagaatcctcaagaagaagtagagaatcttccgattcttctacaacttccagaagaactcatcgcaagcatcgtcgcactcatcccaagatgtcattacccatcgctatccctcgtctccagagcctttcgtcacttaatcacttcgcaggagctctacgtagcacgctcgaacctcggcttcaccgaaccggttctttatgccttaatcggattccaagcgtatactcgcccaagctggttctttcttcgtcggagcaacttcccattacaattacacagaatccgttcacttcctccaatgttatctggtgcagctgtggtcacaatagactacaagatgtatgtaatgggtggttgcatcggctataatcatcctgcatcatcgaatgtaattgtcatcgactgcagattccatacttggaagtatctcccggatatgaaaagggctcgttgccgtgcagccaccggaataattgacggaaggatttatgtgatcggaggctgcaagaaacaagatgctgattgggttgaagtgtttgatgtgacgactcagagttgggaaactgtgcctagcgaatgccctaacgatgctaatgagaatggagagtttattacgtatgtggtgatgcaggggaggcttttcattttggatcttgagtgttgtttttcttacgaaccagtacaaggtttatgggagtcatgggatgatggaagtgagttgatgagattttggcactcgtcgtcgtcttgtgtggttggagatttgttgtatgcacttgatcttacgtgtgctcttgaacatccaatagtggtatattatccgaatgaattggtttggagacctgtgatgggtgtagatactgctcatttgcctattctcactgaatatacgtctacgttggcgaattttgatgggaagttggtgattttgggcgggggcgactgttctgagtcttcttccgaaatttggtgcgtagagattgcgttggaaacacgtcaaggagatcagatttggggggtggttaaatcagtctcgattgtgtcaagggacttgccgatgaggcatgtcattgagctttgtcgaactgttatggtttgatgttacgcttgcaggtatgtttctgtgatgagtttggactttggactattgatgatgaattctggtgtttcagatagtttctttagcctcaagtcttagttagggtttcaggaacttagccttgtgtaattaagcagatcagtttacactaatgaaacctaatctgcttctaatctatgagcaatataaaattttggtttgattatgaagcaaaacagagtgatttagttaacagatggttttatgggtaactacaatatgaaagtgtgggattacaaagtcctgatgaaaggtgaagttatctatgtacaacatacataaagagaaggttatgttatttgtatgaaactctgttctcatttttaaaagactcaatgtgcttaagcaaaatagagggatttagttaaccggttgatatatctagcaaaatggctctctcagtatccttttcatcagtgtcccagtcaagacgacgagaacaaagcacttgaattacaaacgaggataccaacgtagagagagagaacagagagacttgtgagtcaagtaatcacgttaatatacatttgaatcaatttttgtagatttatccaatggtgaattgttattatcgtataaaataatataactgtttaaaataataaacttttctagtttcccaagaaaaacacataacaaaaaaaatgatgatgtataacgagaccctaattaagaagaagaaaaatgatttaatacaaattctttatttgcaattttttctgagatggaatagtgaaatgaaattttggtttcctttataaatacacaacaacacttttttcacaaataccgaattagtctctctttcagttaattcgttgctgctaacgtcacacggcggcgatggttgtactccatgaaattctcgatggccctaacggcgacgatccaaacaataatcctcaagaaggagaagataatcaaaacgagaatcctcaagaagaagtagagaatcttcggaatcttctagaacttccagaagaactcatcgaaagactcatcgcacacatcccaagatgttattacccgtatatatctctcgtctccagagactttcgtcaagtaatcacttcggataaactattccgaacgcgctcgctcctcggcttcaacgaaccggttctttatgccttaatcggatccacacagactcccctaagctggttctttcttcgttggagcaacttcccattagaattacacagaatccgttcacttcctacagtgttacttggagcagctgtggtcacaatcggatacaagatgtatgtaatgggaggtaccatcggcttgaatcatcatgtatcgactgtgattgtcatcgactgcagaaaccatacgtggaactatctcccggatatgaaaagggctcgttaccgtgcagccgccggagaaattggcggaaggatttatgtgatcggaggacgcaagaaacaagatgctgattgggttgaagtgttcaatgcgacgactgagagttgggaaactgtgtctagtgtatgccctaacgatgctagtgcgaatggagtattttctacatatgtggtgatgcaggggaggattttcgctttggatcgttggggttgttttgcttacaaaccagtacaaggtttatggcagtcatggggtgttgcaagtgagttgacgagattttggcacccgttgtcgtcgtttactgtgattggagagttgttgtatacagttgatcttacgtgttctcttggacatccgatagtggtatattatccgaatgaatcggtttggagacctgtgatgggttttcatttgcctattctcagtcaatgttggtccaagatagcgaattttggtgggaagttggtgattttctgcacctgtcttgggacgtttaagcatattttgtgcatagtgattgcgttggaagcacgtcaaggaggtcatatttggggggtggttgaatcaaactcgcgcgtgtttagggacgatatgatgttgccttacattcggctttgtcaaactgttactttttgataattcgatcgtggttggtggtttcttgcagtagcagcaggtatatatgtttctgtgatgagtttggagtactattgatgttaaattatgatgtttattttagcctcaagacttagttagactttcatgaatttgcaggtgaaggatctttactcatcttttattacatctactgttttagcagcttgttgatatgaagcaaaagtgatgcagaaactcttatctgacacattgaagaataactcgttcttcttaacatttgtgcacgatgtgaatacttcttgtgacaaaattagctttatgtagagtttggccactcttttagccttttatacacaaatttcttgagacttgttgaaatgcatctttactcttttggttttttttgctctaacatggtctcaacttctttctgtttgctttttagatatataacttttgtctaagtaagcagattagtttaatttacactaatgaaacctaatctgcttttactatatgagcaaaatgaaaatgtgggtttagatatgaagcaaaacatagtgatttagttaaccggtgttatttattttatgagtaactacaatataaaagtgtggaaatacaaagtcctgaaggcagattagggcttatacgtagagaacaaagagacttgtgagtcacgttcatagacgtttgactcaattttcataggtaaaaaaagcttaaaagaaaattaaaaattgaaaccaatgttaaagagagaacaaagagacttgtgagatacatttgacacatttttttattttataaattcttccattaatgatttttgtttgcacaaaacttaaaagaaaactaaattttacaaaccaccgttaaaaaaatattttccgaataaaaaaatcacatgcaaaaactgattatcttttaccaattgcatttttgaagaaactcgttaattgtttattgattcctaaaacattgaaaatatgagaagtacttatagaaatacattattgtataaaaactgatttaatactctcagttatcatattattgtttcttttattcaaaactcggattaggctctcgctttacgttaattcgctgctgacgtcacacggcgatggctgtaatctctgaaacttccgacgagggctctaatggcggcgctgcaaacaagaaacctcaagaagaagaagagaatattcctccgattcctaaagaacttccagaagaactcatcgtaatcatcgtcgcactcgtccggagatatcactacccgaagctatctctcatctccaaagcctatcgtgacctaatctcttcaccggaactcttccaaacacgctcgcgcctaggcttcaccgaaccggttctttatacctcaatcggattcccaccttttgatctcccaagctggtacattctccatcgaatctcattacagttcaaacaaatcacttcacttccttcaatgcttcctggatctgctgttgtcacaatcgattacaagatgtatgtactcggtggattcatcggcttgaatcaacctgtatcgactatgattgtcatcgattgtagattccatacgtatcgtgagctccctagtatgcaaagggatcgcggtggcgcagccgcgggagtgattgatggaaagatttacgtaatcggaggttgcaagaaacgatataatgattgggttgaagtgttcgatgtagagaatgagagttgggaaactgtgcctggtccataccctaacgttgcaagtgagagtgtagagtttagtcaatatgcggtaatggaacagaagatttacattttggatcctctgttttgtttgacttacgaaccaagaaaacgtagatttgaggcatggggacgtagaagtcaacagaggaggtacgagtcgtgttgtgtggttaatgatatgttgtgtaccgttgattctacgtgttctcatggatatccgattgtcgtgtatgatccaaagggtatggtttggagacctgtgaagggtgtacaaagttctgatttgcctaatctcgtttactatgagtctagaatggcgaattttggtggtaagttggtgattttgggcggtaatcagagccgggatcgtaaggatagttacttggaaaaagacatttggtgcatagagattgcactggaaaaacgtgaagatggtgatatttggggtcatgtcgaatcaagatcggttgtgctgtcatccagcaagtggcctttgattgcgcttagtcgatctgttacggtttgatgattcgatcgtgggatggtttcgtgcattacttccaggtatgtttctatgacgagtttgacctattcataatgataataatgatgttgagacattttcttgagtctcaagtcttagttagggtttcatgaacttgcaggtggaagatcttttattacatctattgttttagcagctttgttgatatgagagcaaaagtggttcagaagcttttatatctgacacctccttatagagtacttttgtgcacaatagaccattattgtttttagcctttctacaaaaattcttatgaaacttgttgaaatgcagctttacttagctatcttctgattttttgtgtagtttcactaacattcttctgtaagtaatcacaatcagatttgacgaaaacctgtttgatctggttttactatatgagcaatatgaaattttggtttagagattaagcaaaacagagtgattttgttaacattatcatacagctgaggttttagcttgccaactgaatgacaatctatacacacacttagaccatctccatcggaatatctgattgagatactcatcaattaaataataattaaaaagagaaaaagtaggagagaaggaagaaggagagaaaagtggagaaacgtttctggcaggagagacgattctcagcatttattgagagttgtcattaaactaatggttcatttactttaaactaattaaaatatattaatttgattaaaatattaatttatttattttttaagatactctctaccacttttgccgatagagatgctcttagattcttgatatatccagaaaatggctctctcagtatccttttcatcagtgtcccagtcaagacgacgagaacaaagcacttgaattacaaacgaggaatttctaagtagagaaaacacagagacttgtgagtcaagtaatcacgttaatagacatttaaatcaattttaaaagatttttccaatggtgaattgttattaacgtataaaaagctttacaacaaaaaaaatactgtttaaaataataaacttgctaatatagtttccccaaaatgaaaaaaacatccaaatttcaaagtggatttctttttttacgtcaaagtgaattttttttaccaattgttcttttgtttttttccgaagaaactttatatatttcagataatattgaaaatatgagtaagtaaagaaaaaaacattaaatgataatgatatttaaatatttaatacattaatgaattaaaaagatatttaagaagaacaaaaatattacagattatcattttggatttttatttctgattaaacattttttttaaacaattttttctgaaaatccgtgggttacttaagagagtatttatttactcaatatggttccttataaatacacaaaaaacatacaacgtaacagcttctttcaaaaaccaaatttattagtctcgctttccgttaattcgttgctgctgacgtcacacggcgatggctagtatctctgaaacttccgacgacggctctaacggcggcgttccaaaccagaaacccgaagaaccccacaagaacccacaagaagaaaaagagaatcaaaacgagaacccgaatgaagcagatgaagaagacgatcatcaagacgaagaagtagagaatgttcctccgattcctcgaaaaatcccaccagtactaatcgaaaacactatcgcacccctccggagatgtcattacccgaagctatctctcctctctaacgcctttcgtcaagtaatctcttcagaggatctcttccaagttcgctcgctcatcggctcaacggaaccggttctttataccttgatcacgttcaagtacccaacatttgaagaaggaagatggttcattctccaacggagaaacaatacctctttaaaattgaactgtgtaacatctcttcctcccatgtttcttggatgcactgccgtcacaataggtcacaagatttatgtagtgggtggttataacttccgctacaataaaaccataagtactgtgcttgagatagattgtagattcaatacgtgtcgacatctccggaatatgaagagggatcgttgctccgcagtcgctggagtgatcgacggaaggatttacgtagtcgccggacgccagagacgatttgatgattgggtcgaagtgttcgatgtagagactgagagatgggaacttgtgcctggtccattctcttcctttgctagttctagtggaaagtttattgtacatgtggttttggataataagatttacattatggatggtgactattgttttgcgtacgatccaaggcgacgtagatgggagacttggggacctgaaagtgcacagaggagttattggcacttgtcgtcttgtgtggttgatgatttgttgtacgcgattgttcctcgggagatttttggagcttcgattgtcgtttatgatccaaggggaatagcttggagacctgtcatgggtttagagttttggcctaatctcgtttatttcgagtctaaaatggcgaattttggtgggaagttggtgattttgggatgttatcggagtagttttgattattacagaaaagacgtttggtgcgttgaggtggctttggagaaacatgaagatggtcaaatttgggggaaggtcgaatcactctcgcttgtgaatgcattccctatgtcgcctttctttgagctttctcgaactgttacgatttgatgactcgtttgcagttgcaaggtatgttaatctttgatgagtatggattgatgacgaattatgatctttcagaaggtttcttgagcctcaagtcttatttatgttttcataaacttgcaggtgaaggatcttttattacatctatactatttgagcagctagttggtatcagagaaaagtaactcagaagctgttacatcttacaccttgaagcgtaactcgtccgatgcttcttaacctttagtactcttttagctgcctttatgcaaaaactttgaaggaaacttgttgaaatgcatcttatggggtttttgtgcagttgcactaacatgatctcaagttccttttagatatttaattcttctgtaagtaatgatcatatacaatcagatttaacgaaacctaatctgcttctaccatatgagcaaatatgaaatttaatttggtttagagatgaagcaaaaaaaaatgtgatttagttgaccggtgattttgactttatgagtggcaacaatcagtcaacgtacgatatcaaagtgaagctatatatctaaatatgcatagagaagatatatgtcatttaatttgtaacattttctctagactcactcattttttgcaaagtatttatttgtaacagtttccaacaatttttgcaaagtatttatttgtcatgttaaacaacaacaatatcactaaattactaaggaatacggaagaactaagactagtaaaaacaattaatttaacagttttttacggatcaccataagagacatgcactaataattacaaacaacttatctataaaaacaaactgtatgcaaggagttcaggttttcaaccatcaaataacccaaaaaaaaaaaaaaaacagaaaaccaaaaaccaaaaaaaaaaaaaaaagtttctgatttttagaagaatgtcaccatcacattttgctatccttttcatcatcgtaatttctctggttcctctacatggatgtacgtctatgagtttatgcatatatatacataatcgctttgtcattgtttacaatcagtcatcaccatattgttatatataattctccagatcaattattaacttctattttttttccttatagctggaaacacacaacatcataacgcgaacaagccaggtgtggattttaactctatctaataacaaacaaataaacgaaaaaacaaaaaaccgaatatcacaaacaatgtcatcgtcaaattttggtatcatttgcatcatactgattttctcattcctctacaagaatgtatttatatgaaatataatcgttttcatcttttacaattatagtcataaccattaagaaatcatattgttattaataaaaattcattttcttttaactattttttttttcttatagctccaaacgcacaagctgttgacgcaagcaaatcaggttcggatttcaaccatcaaacataaacaaaaaaaaaaccaaaaaaacaacaatgtcatcatcacattttgttatcctttgcttgatcgtagtttctctcgttcctcatggatgtatgttcataaatttatgcatatatacaaataattgccttttcattgtttacaatcagtcatcaccattataatcatatacttataaatatttatttttatatttttttggtaaaaaataaatattaacttatatttttttaatagctggagacaagacacacagttttgacgccaacaaggcaggtaattcggatttcaactaccaaataaccaaacaaatatttgtgttttaaaaaagaaagaatatcacaacaacgtcatcatcagattttgttataatttgcatcatcgtaattttctcgttcctctacaagaatttatgaaattaaaggctttttcttcgtttacattcatcaccattgtaaaatatgttgttagaaataaaattattcgcttttttaactcttcattttcttaattctaattttttttcttatagctgcaaacgcacaagctgttgacgcgaccaaatcaggttcggaatatttcaaccatcatatagcaaacaaagaattaacaaaaagaaaaaaaaatacgaatataaaaagaatatcatcatcacattttgttatgatcctttaatttgcatcatcgtaatttctcttgttcctctacaaaaatatatgtttttgaaattatgcgtatatatataaataaggaatcgcttattcatcgtttacaatcatcaccattgtaatcgtattgttataaataaaattcttctttttaattttttttttaattttttttttttttttttttgaacttctaatctttttcttatagatgcaaacgggcaaggttttgacgcgaacaagttaggttcatcagtgtgccatcttggcaaatgtccaaaacacagagaagaagtgtgttattgctgtttcaatgatcgtagcaggtgttatcgtagtttatataagtgtgtggctgtctgcaaccggcttgttcattaaattaacgaccttatacaaacaatacagctacaagtttacctaaagtaaacatatatatacaatataattatgcttatcgtaattttgtttagtgccattgaaagtttaagtaattttatttttctattaagttttcttaaaaaatattaatttattttgaataatatgttgtgtaataagaatttataaattaattagttaatgatgattttgtaccaactaatgatagatcatacttgtatagttgtattatagtaatatttaaaagtaaattttaatatttaggataacaactgaacatatattttttaacagttgctttcgctaatatctcgttgtaattaagaaaagataaaagattgccttgggactttgacatgtgtttttgggtcttcaaccacattctacaggttaaatctaaaaacactaaaattttaaattatataattttaataccaaaaattgtgaataaaaaataaaatattatcatgtattatattatagatcaaattctaaaaaaaaaaacgtattaatatcgtaaacttaaaaactgtacatgatcttgtcaaaaattattaatcaaagaattatatataacaaatttttcattttacaaaaatcaaaaataaataaaatatttaattagcaacatataattccaaaacgtctagtactaaccgtactacaaaagtctataataaacactttacatacaccgtatttatgattggcaactaaatttttgacatatgggaatatgggatacatatatcacgttaaataattacaatgaatttgcttttattaatcagcaaaaaacatttttttctaaaaatcaaactctataactaaggcaaacctttagtcaattcactagaccatacaatttactgttacagttttgttcataaactacaatcgggaaaatgctatctcaatatagttttttttttttcagtacctacggcgaaaaaagctattgaattcaacatttgtgtacgccctttgaaagacaaattaggttttcaaagtaaagagaacaaagctgagacttgtgtgtcacgttgagagacatttgactcaatttttgtaaattcttcgtccattggttaacttttatttaaggtcagaaaccagtgttattctaagaaagaaaaaaaaaagaaaagtttggtgatatagtttacgaagaaaaagaaataaaaaacacatgcagttcttagactgaatttctattaatacccattattttttggagaaattaaactagataatatataatgtttccgttagtattagtgcctttttataataaaagtgtaagtgaaagaaaaaataaataaatgataatatatgcaagatttgagaagaagaaaacatatttaatacatttaaacgaagcagcagagtatttatttactcattatggtttcattataaatacacaacgtaacagctcttctcaaaactctgattagtctctcactttccgttaattcgttgctgctgacgtcacacggcgatggctataatctctgaaacttccgacgacggctctcacggtggcgtaccaaacaagaaacccgaagaactccacaagaaccctaaagaagacgatcatcaagaagaagaagtagagaatcatcctccgattcctcgacaaatcccacaagcactcatcagaagaaccgtcgcactcatcaagagatgtcattacccgtcgctatctctcctctctaaagcctttcgtatcgtaatctcttcgccggaactccaccaaacacgctcgagcctaaacctaaccgaaccggttctttacgctttgatcggattccctcctcatagtttcccgaactggttcattctcaaccacaacattacaagaaacatcccattacgattgagcgctatcggttcacttcctcctatgaatcctggctctgctgtggtcacaatcggctacaagatgtatgtgatcggtggactgatagggccaaataaccctgtaaagactgtgtttgtcatcgactgtagagtccatacgtgtaactatctcccaactatgcatagggctcgttaccgtgcagtcgcagaagtaatcaacggaaagatttatgtcatcggaggttgcgagaagcggtacgacgattggatcgaagtgttcgatgtagtgactggaatttggagtactgtccctgatcgatcccatttcatgtctagtttgccaggaggagggtttgtgacatctgtggtgatgcaaaacaagatttacattttggatgctacgtgtggtttggtttatgatcccattgatggtacatgggagtcaggggagcttggaactacgttgaagtcttactggtacaagccgtgttgtgtgattgaggatttgttgtatagttttgatccatactgtcttcaaggttctccgataaatgtgtatgatccaaatgtcatggtttggactcctatgatgggtacgggtatacgtgcttttcctgatctcgattactttgagtgtaaaatggcgaattttggtgggaagttgatggtttttggtgctacttataacaacccggttacagatacttggtgcatagagatggcgttgataaaaggtgaaacaggtccgattttggggatgatcgattcaatggtgcctgtgcttagatccgtgtactcgccttacattgatctttgtcgctctgttacattttgatgatctgtgggatggtgtttcaggtatattactttttgatgctctgttgagacagtttctttagactcgagtcttaatgaggcttactttaacttgcaggtcaaggatcttttattacatctactgttttgagcagcttattgatttcagagcaaatatgaagaagaaaaagtgtgttcagaagctgttatatctgacacctttatagagtaactcgtctttcttaacctttgtgcaaaaatgtgaatactcttaacagaactggccttgtgtttgtgtagagttggccactcttttgtactaatattcttacgagacttgttgaaatgcatctttggtttagctatcttctggttctttctgttgtgagatgtataattcttcaacaagtaatcacaaaccgattttaacgaaacctaatctgcttctactatatgagcaatatcaatagtacttggtttggattggagatgaaccaaaacaaagtgacttagttaaccggtagtttagtatgaaatcttggttcagagatgtgtgaagatttacttattgatagtaattaaaaaaacttgtgcacttaacggtagagaggaggtccaaatcactaaaccgattgatcttcatatgattataatacacaaaaggtggaacacatacaaaattgactgactttattctagtaaagaattgccacactaatgctttttctccaaaggagaagttctcgatcacaaaggaaacacctgcatcacagagtatggtctggtcaggcaccacaatgtaacaagtaaatctgaataagatagcttcttaattgtaacaagtaaaacttatataatattgtgggccttagagcatgtccaatggtggtttctaaccataatttctaatctattaaagtaataataaaataagaaataatattatttaatttaaaaagtttcttaaaatagttagaagagtcttcaaaatctcttgaattagaaattttctcacatttctttagaaactatcttaattaaataatattatttattattttattattattattataggttagaaactttgcttagggatttgctctaaggccccattttacactcgcttatacaacgtattaggccccattttacaatcgtctatacgacgtcgttagtgtcttcgttattataataaatacgagcattttttcaaatatcaaattcaggctcactttcagttacagttaattcgttgctgctgacgtcacacggcgatggttttcatctctgaaacttccgacgacggctccaatggcggcgatccaaccaagaatccgcaagaagaagaagaagagaatcttcctccgattcctcaaggaatcccagacgaactcatcgaaagtaccgtcttactaatccggagatgtcattacccgacgctatctctcctctccaaaacctttcgtcgcgttatctcttcttcggaactctacaaaagccgcttcatcctcaacctcaccgactcagttctttacgccttgatcggattctctccttataataccacaaacttgtacattctcaattgtaacattccaagaaacatctctttacacttgagagaaatcaaatcacttcctcctctgaatcatggatctgcggtggtcacaatcggataccatatgtatgtaatcggtggacacaaccgcctacatcaacccacatcgaatgtgtctatcatcgatttgagatttcatacgtcttgctcgctcccgagaatgcagagaactcgcgtctacgcagctgcaggagtaattgacggaaggatttatgtgatcggaggttgcgtgaagcgaaatgatcattggatcgaagtgttcgatatagagaatcggatttggagtagtgtgcctcatcatcgatactgtaacggttctagtttgagaggagaagggtttgtgacatcagtggtgatgcaaaacaagatttacattttggattctctgtttggttttgcttacgaaccaagacacggtacattgcagtcattaggatttgaaactcagttcatgtttctttggcgcgacccgtgttgtgtgattgagggtttgttgtattgtattgatcctatgtgtgttcttggacatgcaatagttgtttatgatccgaatgagttgatttggagacgtgtgaagggggcatatattttgcctaagttttgttattatcagtgtaaaatggcgaattttggtgggaagttggcaattttgggatgttctaattccagccagcgtggtttgaaagatgtttggttcgtagagattgagttggaaaatcgtcaaagtggtgagatttgggggaaggtcgattcattggcgattgtgcttagatcagtgaagtcgccttccattgatctgtttcgctctgttacgttttgatgattcgtttgcagttgcaaggtatgttaatctttgatgtggattgactgttgatgatgatattattatgttgagatggtttcttgagcctcaagtcttagttaagctttcatgaatttgcaggtgaaggatcttttattatatctactgttttagcagcttgttgatatgaagcaaaagtggtgctgcagaagctgttatatcttacctttgtgcaaaaatgtgaatactcttacagagttagccttttcttgtactaaattcttaggagacttgttgaaatgcatatttggtttagccatcttctgggtttttggtgctattgcgccaacatggtctcaagttctttttgttctgagatatataattcttcagtaagtaatcacaatcagatttaacgaaacctaatctgcttctaccatatgaacaataacaaactggtttactctaataggtggttattgatagtgaatagaaaaacatgtgcacttaatggtagagagaagggtccaaatcactaagctgattggtcttgatatgattgtaatacacaaaaaaaggtggaacaaatacaaaattgactgagttacctttagtaaatctgaaatatcaccagaaatcgttacaggaacactgcccatttctgaaatgatgaaacctataccggtccctcactataatctctctatcataaagctgagatattagtttagccactgaatgacaatctccacacacccttagattcttaataactcggatcacctttggagcctctgttgatatcagtccataacaaatagccagcttctcgctgtggagatttagagattgttccttcatttcttcttcctcgatgatctgcagaacctgagatatctctggctcataaccatttgatttcagtttctccataacctcgtgtaacttcccgtaaaccttctcagacataggatgagcgttatctccagagagaaactcatgaatcatgccatcgatttcaattgagctgcatcctggttctttcttaagtccagtgactctcatatgctttctcagctcagaaacgttttcccacttacccaatttagcatatatgtttgataggagcacatgcgcgccatcattcctaggttccagttcaagcaaacgggtacaagccatttcagcaagattcagattggcatggatcttacaagctcctagaagcgctccccagacagaagtgcttggaggaatcggcatcgcctctatgaacttcactgctttttccaaataacccgagcggccgagaacatcaactatgcaagcataatgcttttcctcagggacaataccataattcgattccatctggtggaataaagactcagcttcatccaccaaaccggtatggctacaagcacagaagacattggtgaaggtcacaccattaggctttacattagcctcttgcattttataaaacatatcaacagcttcatttccacatccgtgcattgccaagccaccaatcattgcactccacacaaacacatctctcttctctacagaattaaacacttcacgggacttttcaagatctccgcatttcgaatacatatgaatcagtgcgcttgtaacatgaaaattcatcctaataccgtgctttttgatgtagctatggatccatctacctaattccagtgcccctacctgagcacaagctgataaagtacttaccagtgtgatctggttcagcttcatgttcttctgaagttgcagctcatggaacactattaatgcctcattaggtttaccattctgctcataagcagatataagagcattccaagcaacaatatctttctgaggcatagaattaagaacctctctagctgcttcgtagtcttctgaaattgcatacccatcaagcattgttgtccatgtaacgttatctttctcctccattgcatcaaacagtcttttagcatcttctatgcttccacactttgtgtacatatcaagcatcgcattagccaatgtcaagttcacgttaaccctgttttcttcgatataagaacaaacctgcctcccaaactctaaattccgtatctttgcacaagcagacaagacaccaaccattgtcacatgacttgccttaacgtcctctgactccatcttcttaaaaagctccaaagctttatctggagaacccttttgcacaaacccattaatcatcgaattccatgaaacaacatccttttctttgatcgtagtaaacactttacaagctgaatctaaatccccacaagagaaataacaatgtatcaaagaattagcaacgaaaacatcacttccaactgctgacttaacagccatcccatgaagagattgacccaaagacaaagatgaaacttctgcagctgccttaatgaggaaagggaaagtgtacttatttggataacactgactctccgaaaccatatccaagaaagcccagatgctaagaacagggtctggtccagaagcgtaagcacggataagagtattccaagcgaaagaatttggtttaggaatttcatcaaacaccttgcgtgcatactcgagactagcgaaggaagagagcgcagccattgcgaatagcttgctagctgagtaaggatcggaaaacgtaccggtacggatcatgtgaccatgggtttgctttagttgtcggagagacacacatcgttcgatgagagaaatgtggcgggagcgttcgttattggtagttggttgattcggattggagaagtttggatgacgtggcagagagagaggttgtgctgtggagaagatagccatatgagtttttttgcgactctgtcttcctacttttttttcctacaaaactatatagtaatattcttatgaataaattattatatgacaaaatctcactaaaatagttgcacaataaaaaaaaattctcattaaagttcatctaaatttcaaaataaatggaattcactaactcataattttgctatgatttagaggcaaactttgtttaatttgtagcgttaattcaacggtagacacacttttatacatatccttttgctttcaatcaaatcttttaaaagtaggaaaacatatataattgcatcacatctcttcataattagaatcaacgagttggtgttgtgtcgcaatcatattatgtatcaattattcgatttttgttgtgttttcattatattgcaattggtcaacttgggggatccatcaaccttggtaaccacaaagactaatatatttcgatcgtatatttataggtgtttagaatctttattatcgtgttttacttatcatatctctcaaacctaattaaattttagtatgtgacacttttaattgctggatacttttctgtttttatttttgatccttaaaataggtgaagatatacaagatggaagcaactatgggaattgggatcatggtttcctacaaaacatggaatttggagagttttatgaagactcagtcttctattattaatgtggaactgtaattaactacgagtccacgactaaaaaagaaaaacaggtaaagcaatcctagccgaaccatggtcgccacacacccaattacatggaacgacaatgtttctatcaagtcacctatgaaatatccaccgcgacaaacgaatatccaccatccgtcatattgaaatgtgtgaagagtcatatggtttgacaattcctagaggcaggaatcaagaagttttgaaccaaagttctagatttaaatatgttcatccccaaagttctagagttttattcatccccaatttgttaactatgaacacacttagtatatcaactatacgaccattaactaaaatgttaatggttaacagattgtgatggttgaataacagattgatatgcacatattaaaataattgacattttgtaaaaccataatgaaaacgcaattttcggtttccttctaaacgtatgttttcattttctatcaatcaacttgagccacaaagactaatatatttcgattgtacattatcgtattttttaatcacatctctcgaaccttaatagatttttgtttgatacacttttaaaagcagactatttcttttttatccttaaattacattagaaatacaacaacatggaagcaaatatggaatcatggattcctacaaagttacaaacacatggaattgcgaaagttcaaacttctgagaagaagacttagtcttcttttattaaaataaaatggtaattacgatttaaaaaaaaagaaacaaaggaaaaaggaatctgaacagaaacatggtcgccacatgcccaattacatgaaaacgacgcatttctacttacttatagaaacgccgtcgatcaagtcaccgatgaatcttttaaccgcaagaaacgaagatccaccgtccacagcttcttttcccgcctcagcaatctccttcactttactcttcggcacatccacaccgtccattaaagatctaacggttcctgcgatctcatcagctttcactatatctccatcttccgacacgtaatccaaccgcatctccaaggctaaaccaagctccttcaccatcgtgaacgcgtttagttgttgttccgcgtacatcggccacgtggcgattggaacgccgaaacccaaactctccaatatcgagttccaaccacaatgagatacgaatcctcccacagctttatgggctaggatttcaacttgaggagcccaaccacaaacaatgccttgatccatgacccggtccatgaacccgtgtggtagagcctcgtaagggctcgcgtactccttcgggttggttcgaaacgaccagatgaatttgcagtcaacgatctctaaggcttgagctatctcgttgatctgagtagcgctgagattcttcaagctcccgaaacagaggaacacgaccgatgactcgggttggtcatctagccaagttatgatccgatctcgttccgatgagtccaaattcggacggtcgttggagcataatatcggcccgattgggtaaatggttgggtagttatccggacaacgatcgaaatatttaaaaccgtttggctcgagagctgtgtatgaattaaccaaaatacccttagcttcaggaaacctctctgctagttcgacccaaggctcgtaggtctctttcatgaatagacctgacggcaaaaccttagtaggaacagagttgacataaccaggaatgagattcaactcctcgttgaagctccggttgaattccgatttgatttcgcggtgtctctctggaagatacttcatcatacccaagaaccctgcgctacacgtcaagaaaatgtaagaagggagattaaactcgtttcctacatcgatcatagggacgcagaagaagtcaagaaccaatccagccacacgaactgaacccgattcatcgcgggaagacaagagagtggagagagcttctctgatgatgggaaccattttcttgacgtattcaagaatgtaagattcggcaaattccacaaagagttccattggtggagggtcttggacttcgggcaacgtaacgagacggatacgaggctcatttttgactagggatcggaggaaagcgattgtgtcagcttgaggaataaaaggtaatccccaatagaggatggtgatggtgtggatccgaggattgtcttgacttatgagacgtttggcgagttcgattgttgcgagaatgtgtccggagaaagggaaaggtatgatgacgagctctgcatcttcttgcttccccatactagggattttctgagaaactcaaaaagtcaataggagaagacaaaaataaaaatgaaacagagattgtgcaagagttgttgagaaagttttgttttgtatgtgttgatgattgttggataatttatacaactattagtaagaggcagcgaattagttaaatttaaacacaacttgtattattatagtcgtacatgcagacaaaaataaataaaaatgaaacagagattgtgcaacgcagttgttgatcgaaaggtttgttttgtatgtattgatcattattgactactttattcaaatattagtaagagacagggaaaatagttaagtttaaatacaacatgcattattattactgtacatgcagacaacttaaaaataaaataaaattagtgtacatcgatatcaatgcatatgtgacttcgttaaacagatcactacaacatgtgtcatttgttctattggctaaactacaagacctagcgacttttgtaggccattcgagtggatttaaaacacattgggtgaaacaacagagaagtgtataaaaacaacacttgactttgtaaatcgtttctatgtttttattataaggatgaaggggaaacacacaaaaacaaaacaatttcttttcttctacaaattataaagcagagttatgcgaactcaactaccacaaggattggttgttatgaaaatgttttatataaattgaaatgttcttaatgtgtagaatcattagaagcaaataaaattttgtagtgtagtttaagggggtgttattggttcctaatttacaaagaattttgatgatttcaattaaatccttgaaagtaaagaaatgaaagattttaaataattgttagagagttttttataatcttgttgattagtttttcataatcttgtaaagtttctcaaacaatctttttattttgataatactttacatgactttccatgacttcattttgtaaagaaaaatgtagaaagtcatgaaccaataacacaataatttaaatcattaacaatcaaatattcttttgttttaattgaataacacaaaactttaacatactttaaaaaagtcttgattgagtaacaacagattttacatgacaatttaaatcactaaaactcttttgaaatcataaacgaataactttagccatttttttgttttttttttacgaagagataaacataatgatctctttgcatcacatctcttcattagtcagtgtctacgagttgatattgtgtgttgtgtcgcactcacttcatatttcaattcatcaaagcatgcttcctagtaatacacaatgttaggggagtagagatttaaccatacatatagtaagatagttgttttgttttcattttattgattaatttgggcatctcaatagcaggatagtaaccctaataactaatttatctcgattttacatttttgtaatgctcaattatactgttttgatgtcttttagaattcatttgtattttggttatttcatatttccacaagttatatataaaacaaaatgcaaaatgagctatttagatatataacaaatgagtaaacacaaaagatcatgcatactatcaaaaggaggacttttatagagttggataaagctcaaagccattagagactcactcaaagcaagcttaaattacataaaacgacaacgtttgcatggtgtaaaaactttaaaacccatcaccgatcaaagcccatctatgaatcttttaaccgcaacaaacgaagatccaccgtccatcacagcctcttttcccgcctccgcaatctccttcagtttcctcctcggcacatcctcaccgtccatcaaagatcgtacggctcctgcgatttcatcagctttcacgatttctccatattccgacacgtaatccaaccgcatctccaacgccaaaccaagctccttcacaatcgtgaacgcgtttagttgttgttccgcgtacattggccacgtggcaattggaactccgaaacgcaaactctccaatatcgagttccaaccgcagtgtgacacgaaccctccaattgctttatgggccagaatttcaacttgaggagcccaaccacaaacaaggcccaaacccatgactcggttcataaacccgtccggtaaaatctcgttcgggctcgcgtactccttcgggtccgttcgaatcgaccagaggaatctgattccgacgagctctaaggcttgagcgatctctttaatctgagacgcagcgagactcttcaagctcccgaagcagagaaacacaacagatgactcgggttggtcatcgagccatttcaagatccggtctcgttccgataaatccaaattcggacgatcgttggagcatagaattggcccgattgggtaaacgggtgggtaattatccggacgacgatcgaaataatcaaaagcgttacgttctagagattcaaatgaattgaccaaaatacccttggcttcagggaacctttccgccatttcgacccaagcttcgtaagactcagtcgtgaacaaacccggtggcaaaactttaaccggaacggagttaacaaaaccaggaactgatattgtttcctcgtcagagctccggttaagttccggtttggtttcgcggtttctctccagaagatacttcatcatacccaagaaacttgcgctacacgtcaagaagatgtaagaagggagattaaactcgtttccgacatcgatcaaagggacacagaagaaatcaagaactaatccggcgacatgaactgaatccgattcatcacgagaagacaagagagtggagagagcgtttctgaccaaaggaaccattttcttgacgtattcaagaatgtaagattcggaagctttcacaaatagctccattggtggagggttttggacatcgggtaaggtaatgagacggatacgagactctgtttcgattagggatttgaggaaggcgatagtgtcagattgaggaagaaaaggtaagctccaatggaggatggtgatggtgtggatccgactaggttggtgactgatgagacgtttcgcgagttcgattgtggcgagaatgtgtccggggattggaaatgggatgaagatgagctctgcttcttgctgcttcgccattcttccggcgatttttttctagatcaacttagtagtcaaaagaagacgaagctaaaggttttgtcttatctcaacaaaataaaaaaaaataagcataagaaatggtcgagggtatacgtgccaacgtggtggagagacattgagcaagtaattatatttaaataccactagcttgtgataactaagcaagtggtgattatagtaccaatataattgtattattatagaaggtaaggaattaaacacaacacagtcatctatgatgttgagctgttgagaataacttaaggtataagataagatcatcaatcccctcttgtgttgggagtgaccataggaactttgtagttgtagccaactacactttaggagctctgaaattttcttcatctccaaaacaaggaaggtaaacaatgcattaatattaactgagattgaaccaaccatttgtttgatctcatatagtcatatatgtcaagggaaattttatatgaccagaaaaaaggaatatttacaatttaaaattctcttgtatatatctaacatatataactctttgaatttattagagtcttcattcatataagtaaagggaagatatatttgaccccaaaaaaaaaaaagaacattcataatttacaacatactcacataaatataaaataaaattctttgaatatcattcgaatatattagagtattcgtatatgtaaagagaagatttggtagactgacatctcctaaacatcttcctcatttatgtataaatgtatcacctcatatattcatatttccttttctttgtagacattactatttatttaatcatttccttattttttcatctttacttttcttcgtaggaacattactatttttgtaaattttcctcatttattatgtacaaaatgttatttcacacattcatctttcctttccttcgtacattactcttctataaagtacgtataatcacctctcttagtaacaaaccatcatcacgtcattatactaaaaatctcatagaattgttcactttttttaaagatggcaaacatgtcgccgtttttgatgttcatcggaatcctcctatcatccataatgatcaaccaccttcccgtagcaaactcaaaacaatggtgtgtatcaatgccgacagcgacgtatgagcagctagaagataatctcgggtttgcgtgcgctaatggagttgattgtagaccaatcctaccaagtggagcatgttttaagcccaatactacaataagccatgcttcatacttgatgaattcttattacgcacaacatggccgaaccaacaattcatgctttttctttttcccaaatagtgccatgctcacttccgaagatcctagttacaatctgtgtatctataaataggtcatccgtggaatacgacgtgctaggatgaataaatacgatatatgtttctttttttctgctatgttttgcctatctatagttacttacccaaacttcagattttctttgcgatgtttttttaattgataaagtgttcctttggtgtgttgttctaagatattacaataaaaacaaagattgattcaataataataaaaatcaaatctcagcaaaattcattcgtagctctttcaaaaacaagttttagtacaaagtaacaaggttatagcttattggacaagaaaaggctagggcttaattcctatcacgtcatatatgaatttctcaattgcggcaaacgaagatccaccattcttcgtagctctctggatcatctgcgagatatccatcactcgtttcctcacaacattattatccgtgtccattacataacgaatagcggtctctatctcgtttgcgtttactatctcatcactatgtaccctgtaatcaagcttcagctccacagctagcttcagttccttcaccatcagaaacgcattgagttgttgctctgcatacattggccatgtcacaattggcacgccaaaccacaaactctctactattgagttccatccacagtgagaaacaaagcctcccactgccttatgggccagtatttctacctgaggagaccaaccacatatcattccacgtccatcgacacggtcaaggaacccctctggcaaatcatcctttgtcacctcttctttacggagtgaccagaggaatctatattgacatagctcaagtccatgagctatttccttcactagagaacctcttaaccttgccatactcccaaaacaaaggaatacaaccgatgcctcgggttgatcatcaagccatttcatcaactcgtcacgacgggttaggtcctgctctggatgaggctgggctttcaagtcaaatatggggccaacagcataaacagaaggataattctgttcttgaagaaaatgattcacagagtaaggctcaatatcaaaggagctattcactaggattccattggcctttgtaaacaatatggccagcttaacgtaagcatcataaccatcttcaacaaacagagctgacggcagaacattggctgggacagggtttacaaatccaggtatcgacaacatttcttccgagtttcttacaaaaaccgatgtatctctactatgtcgatctgctagatactgcatcatagctaagaacccggaatttgtagtcaagaacacatagaaagggagacttatatctttagcaacgtcaatcatagggagacagaaaaagtcaacaactaatcccttgaccttaactccatccaatgcaagagaagttaaaatatccatgactatattcctcacaagagggatatttctctcaataacatcatacacataagcttccacagattgtgtactaccaagtgtaggtttctcctctaactcagggacatcaatgaatctaacaaacggttgagaggaggcaattgatttaacataagtgtctagatgagactgaccttgtagtttcatcaagaggattgtgatacggatcctatcatcttgctcaatgagacgcctagcaaattcaagaaacggaacaagatgaccaacggttggtgtggggatgaagatgagctctacattccgcatctctaacaacaagagatagcttttgattttctcttcctcaatctacattcaaagaagagaattagctaccttaatgttgacttttgtcacatgtgatgattactgatgtgttgcttctacctaatgttgaggtggcccttagcaagcacgagagggaagataatggccggcagataaagatggtagagtgggatccacaaccaaagaaagcttctaattatttattagagagttatttgaacatgttatcagagaatctccattttatacaagattttcagttaacatgtttttggctgagtcactttatatatttcaatccattagacatttctatctttaatttttaatctattagacatctcctgatgattgaaactgaatattaccaaggactcaaattgtgacttagataatcagcaagttttatataaaaatgtcaaatgcaactatggaatgaaggagatccatttgaattatcataactcaattacattaattatttaaatagtgatagagtcttactcgaagactcttaactctgagtgaactaaaaagccgacacaccaatccagtgaggctcaacaccaacacacaatgaagtaagatcttaacgaaagttgctgcaagctgaaattcactagagatcatggagatgggccaaaccaccacatgaatcccacatctttcctacttttatattcaatcaactaactttaaaatccatgattgattaacactccttcatgaattgaaattgaattctctagattttacaattcgatattattgtgtggatttcaaaatctatacaattaccttgggtttttattctaataatttacttatgaaactttatgagatttcatttcaaatgacttcatatacacatatttcaaaagtaatttagttttgaataacattggattttaatgaagtatttaaattttaaaatatattaagcacaattaacaaatataagattttgaataacagtgctatttaacacttgtagaaatgggtaagtcgaaacttctaagatttcaaagtcaaaagacaacattgttagttattgacatttcttttcaaactgaaattggagttgacgccataaaagaccaataggccaaaaattaaagggcatatacactttttctgagttataaatttgtagcctcaactcttaaggacccaacattgactcatatgctaaatctaaatatccccaagatacttttcaacgacaactattgatgttcaaaaataaaataaggtctatataagtttaggcaattttgtgactacaatttaatattgattatagaaaagtgaatccacttgacctcctcttggaacgcggctatgtctcttgtgcgtccgatctatcctttcttggccagaagcaagagatggtttccggttcgaaccggattaaaatcggtttgcttaacaacgaccagagccgaaacaagcggtgttgacagagaggagaaagtagtgattgttgggggcgggattggcggacttgccactgccgttgctcttcaccggtaagtatataaattacaaaaaccggttctttgaattttcttagaaactcagagccacttaaccggatatttttgtttgatgggtttaggcttggaatccggtcggtggtgttggagcaggcagagtcgcttcggacaggaggagcatcgctgacgctatccaagaatgggtggcgtgttcttgacgccatctccatcggacctcaactccgaaagcagtttcttgaaatgcaagggtacgatttttttgattctgtcttgtaataatttggtcttggttttagctgagtgtgttggtatgataagctgtgcagggtggtattgaagaaggaagatggaagagagcttcgttctttcaaatttaaagacaatgatcaaaggtacctgctacttcataatttgagcattccatttgattcatcatgtgtgtataccaaccaaagcatatgtcttgtatagccaagaagttcggggggtggagaggcgagtactcttggaaacacttgcaagccagcttcctccacagaccattcggttttcttcaaaactggaaagtatacaaagcaatgccaatggtgacactctccttcaacttaaagatggaactcggtttcttgcaaatgtatacttctcttaagctctggtcctatggttatgtgtttattattctcagtacatggctgatttgatgatgtatgtctttgacagattgttataggttgtgatggtatccggtctaaggttgcaacttggatggggttcagtgagccgaaatatgttggttattgcgctttccgtggccttgggttctttccaaatggacagccatttcagcaaaaggtgaactacatattcggtagagggcttcgagctggatatgtacctgtatctgcaacaaaagtctactggttcatcactttcaacagcccttctctaggtagatttcaatacttgtcacaaattccacaaagataattccttctttcatttcctaatatcaaaaaacttgagacatgcagggcctcaaatgatggatccagctatcctaagaaaagaagccaaggaactggttagtacctggccagaagatctgcaaaacctcattgatctaacacctgatgaagcaatcagtagaactcctcttgcggaccggtggctttggcctggcattgctccttcagcatcaaaaggtagggttgttcttgttggagatgcttggcacccaatgactccaaatcttggacaaggtgcttgctgtgccttggaagattcagttcttctggcaaataaacttgccagtgcaataaatggagggaccgaatcagttgaaggggcgatggaatcatataggagtgagagatggtctcaggtattccggttgacagtacttgcaaacctagtcggaaaacttctgcaatcagacaatcctcttgtgtgttccgttagagacaatattgtcagtgcaatgggaaaatcctctcggaccaacgatggaacacacaaactttgagtgtgagcctctctatgtttcaatattgtctatgtaatgagatgtaaaagcatatgctccattggatagaggacttagacaatgtatcatcagaggaataatatcaaagaagataatataaactctgattgaatgtaaaagaataatacaatgtaattcgtttatgctatgaaagggaatgactctagagctaacattcgtgagaaaattgtctcaacaaaaacagagtaagtttgacctgaagaagtaaagaataagagatgtacccaattttgaacaaaatccataacagaagaaatgcagcattggctaacaaagaaactcacagcttggtagataaaggaatcaacacagacaaagttaaaagcaaagctgatgacaaaagaatagaaaaaaatattagaaacaaagcagattcaaaggactgttgcataatcaggttacagtttatggagaatccgataagaaaggctaagtcctggttcctatcacgtcatgtatgaatttctcaattgcggcaaacgaagatccaccattcttcgtagctctctggatcatctgcgagatatccatcactcgtttcctcacaacattattatccttgttcattacacaagaaatcgctgtctctatctcgtttgcacttacaatctcaccactatgtacactataatcgagtttcagctccactgcgagcttcagttccttcaccatcagaaacgcattgagctgttgctctgcatacattggccatgtcacaattggcacaccaaaccataaactctctactattgagttccatccacaatgagaaacaaaacctcccactgctttatgggccagtatttccacctgaggagaccaaccgcatatcattccccgtccactgacacggtccatgaatccctctggcaaaagatcatcatttgtcacttcttctgtgcggagtgaccagaggaatctatactgacatagctcaagtccatgtgctatttccttcactagaggacctcttaagctacccatactcccaaaacaaaggaatacaactgatgcctcgggttgagcatcaagccatttcatcgactcgtcacaacaggcgaggtcttgatctggatgaggatgggccttcgggttaaatatggggccaacagcataaacagaagggtaattctcttctccaagaaaatgattcagagaggtaggctcaatatcaaaggaggtattcactaggattccattagcctttgtaaacaatatagccagtttaacgtcagcatcataaccatcctcaataaacagagctgacggcagtactttggctgggacagggtttacaaatccaggaattgacaacatttcttcagagtttcttgcaaaaactgaggtatctttcttatgtccatatgccagatactgcatcatagctaggaatccggaatttgaagtcaagaacacataaaaaggaagacttgcatcttttgcaacatcaatcatcgggagacagaaaaaatcagcaacgaatcccttgaccgtaactccatcaaatgcaggagaagataggatacccatgattatattttgcacaagagggacatttgtttcaataaaatcgtacacataggcttccacagactgtgtaccaagtgttggtttctcctctaactcagggacatcaataaatctaacaaacggcagagacgaggaaattgtcttaacataggaatccagatgagactgaccttgttgcttcatcaagaggaaggtgatacggattctatcatcctgctcaatgagacgcctagcaaattcaagaaacggaacaagatgaccaacagttggtgttgggatgaagatgagctctgcattcctcatctctaacaacagtcacctttggttcttttctccacagcctcgttatctgttgataaaaaacatcaatctacataccaaagaatggagttagcaaccttcctcctgttaactttgccacatgtgatacacgttgctcttaagtcctacctaatgttgaggtgactgtaaaccaataatggcaggcagataaagatgatagagtaggtaaaatccacaaccaaacaaagctactgtcctgcatctctctctctctttcttcatttcaataaatcaatctcacatctctaaaaccagtgaaatggaatgagaatccgggaacgtcgttcttgttctggaaaatttaccttactgatctaactcgttggagcagcagtttcagcttggtagaagagaaacgtcacagagagaccaaatcctccttcagaaaacccctacacagcttctactttttgaacatcaatcacttgttgaatcaaatcaaacttaagcaaatagatcaaactttatacaggaacaacaaaatcattcaaaacataaacaggaactcactggaatcaaaaatcataacaaagagagaatcaatttttgaaacttgaggcattagatacatcacgatcacggtacaataacatcataacttaaaagacaagagagtgttacattccacgaaaaccctaaggccaacaaaatcatacataatgatagtaatcaccgcctgtgatcataatcgagaacctcagaatccgtcacagacctcgagtgttgcacaatcgatcttccaatcgaattaatccactcttctttctccttctcattatcagcaatgaagaacatggtatagctaccactagatagctcaaaagcaaaaggcttattcacaacatcctcagctcctttcacggtgagacaatcaccaacggagatcacaccacgcggcgtagatccacgaattccagcagcggcttgatctttgaaccagagaagcttccctcgtttgagaacgaaccaacgacgacgccaggttttgatgtaatcgccttgctttgtgagccaaccagaacgctcagggtttgaccagaactcgatcccttcgtaatcttcacggctcggatcttgtcccgtcgcgattcgccagatactctccatcttcttcgtcttcctaaaatctcaccacgacttgttcgtctctccaactgcccccaatcgcgcgattccttgttgcttttaatgtctttctgtattattgtgattcggtatccactcaattgctgtcaaaactctgcgttttggtcgctcgttcagtgaggtcggtcgcgattatgctggctctctgcgttttatggggtcacgtaagaggtgttgggtccagtaggtaagattaaaccgatatggttaaaccggtttagtcaaaaaattccccacctgaattcactaatatcaaaccgagattacaaagtaagtaaaagtatgtaggatttttgaaaaacaaattattacattaacggtttagcttttctctgtcggtaacattatagcggtaaaacaataataataaaaagtcaactgaacaagaacacaaaataatgtcaaactgtttatttttaccgtccatctgaaccaatttttattaaccgtctaggattaaggtttcatcaattggtgatcactaacgcggttagctgccaataggtgtggttggtctggtatcaatcacagcctttatcagtagttcaaactatacttgtatgatcgatcatatgatattatttgtaaatatttgctaccaaattttggtccgacagacctcaaacctcggacagaagtcctaaattctaaaacttaaaagagccaatctcgcaaatcaaacagctatgtggagtgagtaatgctgaaagcaaaagtaaagaaataaagaatgcttatgctcagatattgttgatgtgaggtgtgatagtagtaaactcaggtgcctcaagaaaggaggactcagcaagatcgatggctcgggctaaagccgctgctttgttctcacactctctatgttcatcatcagggttactgtctgcaacaatcccagctccagcttgaatatgagcaatccattctctacgtctctgaggatgcttgtatgagtacaatgtgtcataacgggtatttgttgggaagaccattgttctgagagctaaggcaatgtccatgtctccattaaacgaaatgcctccaaagcctccactgtaaggaccacgccttgttacttcaagttcatctatcagctccatggcttttacctgtaacaaatgatttttgagtatggtgaatgtgtaatgtttgttgttttagtgagagagaacctttggggctccgctcacggttccaacgggaagtacagctctaagagcgtcccagcttgttagatgatcgagcaattcacctactacctgcgaagatggaaatgtgtagtgagacaaacagaaattggacagcatattgttaagctcatgtacataacatgtgaagtcacatattcatgggttctgtagtctagagagaactaggcttcaacaccacttctattcaaaaatttcattatccaactatgatctcttataaactgaaaacaaaggactttcgaattaaaagtttgtttgtttgtaaaattgcaataggagcataccgtggagctaatgtgcatgacatgtgaaaaccattctatatccttgagcttcttgacctccacagaaccaggctttgaaacctgagtttacaagaatatccaacaagttagactaccgagtaagaactgcatcttagcttctaaaagaagagggtaagagactgaaagtgaaagcagtggtaaagtgatgaaccttgccaacatcgttccttcccaaatcaacaagcataatatgttctgcgcattgtttttcatcgcttaagagctctttttccagcattagatcttctttgggtgtcttccctcttctgacagttccagcaagggggcgattggtaattttcctctgtagtagaaagaaacacacattgagccattcatgaaacgaagttcatagattaagggaaccaaagattaagaggagagagtaggtaacacttacattttttgaacgtaacaatatctctggacttgatgcaactaatatgcatcctctaacctgtaaattaaacacatacaagaaaataaaagagagagtccacagattagtaatattattttcagaaaagatgtaaggaaacaaggaccaaaagagtatacctgcaaataggccatgtagggacttggatttacaatcctaagagctctatatatctcaaatgggtccgcaaatgtccgcctttcaaatctctgactaagaactatctgaaagatgtccccagccaagatatgttctttggcttccaccactgcctccttgtatgcctcactcgtcatagttgatttctccaatttcggaccgaagagctgagtgcgtagttttatgaaaccagtaggcatcttggggctgcaattcaaaggaaacacatgagcataaacagaatttacaaataaaagacaaaaattacaatctaaagactggtaaaacgaatctactcacggtttttggtcttgaattctagaggttagagattccaaccgattcattccttcacggaaattttcttcaacagaacgatccttatctatccgcacccagtggatcacatatgctttctgtgctcaacaggatcaagaaaaactagataaactcttcaattcataatccgcaggaagatgcaaatactagtataccttctcaacatgatcaaacacgatcacatcatcataaagacccaaattaacatcaggaagactcctatcatcctctggagcattagaaaaaggcagcttcttcttctcaacataacgtacagtgtcatatgaaaagtatccaacccaaccacctggttacaaatcaaatcaaccatccaaacaaatcagcaatgctaaaacaaacatcactctatttaaaaacagatttctccactcaccgcagaaagcttcaggcaattcatcaatgccttgtggattccattcctccatgattttctgaggaaccatcattggatcatccacttcctcctctgtcctaagactagctccatggtccatcacagtaactacatttccctttgcaacgatttctattgtaggctgagctccaactacactatacctaccctaagagaaaaatcctccaagagttcaatttcattgaaccaaacaaaatgcaaacactgagaacaatcatcaaaaaggaaggcttacgatgttggacgattgcgaaccaggctccacagactcgaacaagaagctaggagcatctctatcatcttctttcaccaaacatcggtaagcaagtatcggagtcaaatgatccgagaatacacatcggaatagaggaactaagtttcccttttccgatgcttttttaaattttgtgaactgttcctccgataaatctgtgaggagaagaagaagttcaacttcgatcgaaattgagaggcgctaataatgggggagatcagatttttacctaacgacggagtatatgagcatttgatagaaggaagacgacgcgagaagtggaggagttttgatccagccacaaggttaagagaagtagccggcggggacttgagcgatagtggaaaccggagcgaagggaaatgtggtggatgcggcgtccgatggtgtgtaacggctatggcttcgacggtgaaaaaatcagatttgacggcggagattgaaacggccgacatccccgtgagctcgttgattttaagtctttcgataccagtttaaacctttttaagtgtggactgggagaagaatatatacactacagtactacaaatacaaagcccataaagcaatgttttctaaaccggaccggcgatcggaccgaatgggaccgcaaacgaaagcatatctggattttattgccaaaaaacagtcaagcatagttttataaccaacatttattccttaggggtttgctggattcatgatctgtgttaattttaaaatttaatcagaatttttggtaattttcaatttccaagttgaaattatgtgctattcaatcaataatttaaaatatttaatccatgattttgaaatttaagctatagattttaataatttcatggatattttaataatttcatagagattttaaaattaaaaaatacgaagaaaaacattttcaatcatagcaaatcaacaaaaagttgtaatatacttgatgcacatgttattttaaccaatggtgcaccagagcaccttggagatgttttaaacacttctaactttccgttggggtgaattcgttcatgacaaagttggtaaaaagattaatagattgtttatattataatgaataagaatatggcaaatggaaaagagtcttcagtatatgagggcttttgtgaaccacggcgcatagtggctgtaaaatgccttagactaaagctgagacctccaagattttgaacggaattaatagccacaatgcatcagacgaacactcaggaatcaaggagtcaaggacaatcacttgatggcattaatttcattgagagcatgactaatagtacaaaaagagaagaattacataatatgagttcagcttttgcgctaaccagtaaaaactaataaagattatattttgtttatgttcctgcatttacatgacagaataaacaatttatgtgtactgatttttttatatatatataactctttgtattctgtaaagaatgaaggaaccaacccatctataagactataactcagtaacttcatcatagaagacagttgcggaagaatcgaatctcctgtggtgcaatgaaaagagaaggtgttaacttaagaaactgcattttcggaataataaacaaagagtgtaatgtatataccttaagagcaaatgtgatgtctgcttcatctactctaaggctcactctctttagtttatcgtctcgagcaagactaagttttagaatcccctgtgccaaacaaaacaatgacatttcaatcaaatgtctattatataatgcataaaccatacacaaacatgagagttaatcttataggattagataagtacctgatcatttagcactgtacacatattactgaactcagtaattccagctggagttatcatcgaagatttacagatttccaagtatagcttatttaactgcatcaaagtgtgaagacagagatgaatattatgtacaatgtctataaattcatgagttgtgtttgtgtattgctcattcaatgaagatttacctctgcaatggttctatcctttttgctccctcgaaaagcctttgcagcagaacagactatgatctgcaagttttcaatagaagcatgttatttcagtccattacatactttcagagtaggtcttattagccactaagtcagagaaccaacacgggtctttagtttctttgtgacttcaagtttgttctcttaatactacgattttgctaattctaggtaagatcatgttgtaagcatatcctaacagttacttaatagttaaaaacgagaagaaccagatatcaataagtgtgtgtgttttgatgtgtaacttacttgttggtgttgaggtagagactggatggtgtcaactattggagatttaaacgtcttggacaatgcagctatcatatgatccatcttgacctatagattcgataaaaacaattatgggataagacaacggtttctatggatatttgcatcgtcagtaagtgaactgagtaaagtagagagtaaaatactaaccacttgacactctggaactggaccttttggttcttgatctattgatcctctaacttctatttctaagatttctagagcgctcctggaaattgaaaaaaaatgtgagttaactgagattgtcatctttaatgtaatgattttaagagtgaatttacagtataaagcccatttctatctcattcatcatatgcaatacaagaacaaactcaaaggaaacgaaattcgtaagagatttcacctgcagacacatagagcctttctcatgtctcctgatgcagctgatactttctggaacaatgcaaacattatgaatatcaattaaagaatatcaaaatgaaaacaaggttgagagaaataaaaaaatgacatatattttcttactcttgcacatatttccaaggcattggactgaaatgcaacaaatggaagtgcctgttacaaatagtgaaaataataatttaagatcaacatagaagtaccataagtttagattagatatatcatcatatagtttcaaggtccttaaatgggtcaaaaattgttattgacatgttaatctactatgcattttttcttcataattccttgaataccattaatcagccattcctctctcattaaaggcatcttttaagacttaccacaagcctctcctgcagaatcctaaggatctgatctttagaataggcacggaaagtgacaaccaaaggtttgcctgcattggatggaagtataagttacagaagtatactcaacttttaatcttcatcaaagcttaggtacatatggtgaagaaagaagagtgttcaaatggcaccacacagtgatggagaaattcttacaattaagagacttcaattttggaaggaaacgatctgcaaggtctattgcatttgctacacctggaggacaaatacgaactttaaacttaaaacttgtttgaccataggaaacagattttaaaaaatgaacattaataacgcaaaagacagtacctataagtatacaccttgacaatggcaaagttgtgagcataaaaagctcatgaaggacacctcggtctcttgtgatcaagtaatccatttcatctgcaattattagcctgcagataaagtttgaatgagaaacagcgcaacaaattatatctacttatctagcaggtcatcatatcacaagaccaaaaacaaaagaaaaacctacatcatctttgatctggattgttgttgcttttgagaaaacaatctctgaagttgttgtagaggtgaaaatgaaccattagctttcttcccggactcatagttaccaagtatctaaaaacaaaataactcaattaacaactatactgaaatgatgagaccaataacttcgagtaattttcgactggataaggtcttaccttggagaaaatatctgtactttttgtcagtgatgtgcaattaacagacactgtttcaggacaatgcaaacctgcctgtaagaattcatgaaagatcaatccttctattgaaagattcaaactaatcacaatttatgaaacatgcacaaagattggttacctgctttgcccattcttcagcttgtagtcttactttctccatggatagtgactttccagttccaggacacccacatatatacaaactaccagccttcttctgctccatacaacctttaacaaactcgaaaacccgtctttgctcatcctcacgacaaacaacagttgacggtgccttagatacatgtaatgcctccttcacagctttcatttgttcatcatctgtatccattcaagatacatcaatcatacaatcaaactaactaagagcatgagaatcaaaaagctcatcatatatacatacctttagggttccactttgatttaacctctaaacaaacagatatcactggattttccaatttttcattagaatcttccttaatctcctgcaatcagaactacaatcaaattgattctctcactcgaataaactaaaccaaacaattaaactaagaacaaggagcttacctcatcagaggtcttagggattgaaacagcacatcgacgaggcgatttccatttcatcggtgtagatatcgaattcacaggcaacaccaccgtcgctgaaacctccgcagccgaatcggatatcaacttccgtttccgagaagtgttgacttcggcggatctaacacctccgatactctccgatctagaaccgacgacatgtttctgaggggaagaactaggtccggcgattgcaggcattgtaggttatcagaaggaggcagaaaaaaggcgggagatcgagatcgatgttgagattgagatccaatggaatcgaagtgaagaatcaatctcatggtttttaagaggaaaatgagataagaaaaataaatgaaaaaaaaaaaaaaagtaaacaaagagggaaaaatggaagtagcgggaaatagcaatggaacagaattttttcgccgcccggttttcttcggctaccgttttaaaccatcggcttcgcggcaattttattgggccgcattatggtttgaacaatttaacgcctattaaagccctttaacggcccatatatgaccatttaccacattaccatctctggcgggggaaaaaaagtgataatagttaattacgtgcacaacaatagtaaacgtatcttaacctataatagcttttctcattatatacatatagtataaaaaaatatgaagcaactgtatatagtttattcactcttaactacttgatagatcagaaattacatataatgacaaaaaagaatcagaatataagataagaaagctaggtgatctatgtgtcaaactgtcaatgcacttatatttatttatttcctcatatatataatcattgaagtatgagatatcatcatatcaacatataaagacgacgtggagatatttttcatgtatatctggttcataaaaggttttatggaagaagggtatccacataaatcgatgatatatcatatgatgtgtagccaaaatatcaatgcattgatatagaagaaggatatccacatacattgatcatatatcatacgatttgttgccaaaaaaaatcaatgcattgatatagaagaaggatatccacatgaattgacgatgatttattatatgatgtgcatgtatccaaaaaaatcaatgcatgcgtagactagatatctacgaatataaaatgaaggatttttttgataaatactaggtggaaagaagataagagataataagagtggtggcctttgtaatgtctctctccttttgattttcgtattggctatatcctcctttcaagagtcataactatgtaagaatttagttcctatatatgttaatttgatttttatattttgttgtgttatataaagtacataagagttgcatattaatcaaccaaattatttaccttatataaattaaattgcattcaatatttgagctttgcgaacgttcttcttctcattgtcggaatccaaattctactctctttttttgctgctaagagagtaaatatcattagatgaaagataggtgttacaacataagacctaagcaaatgaaccttggcaaaaataaatataaaacaatgaaacattttgattatacacattctcaacaaacattttgagctttgcgaacgttcttcttctcattgtcagaattcaaactctactttttgccattttttccataataccccaaaatcgaggttaggtggtatttcaatcgccaactaattaaccactacatatccaatcaaaattattcttgagaaggctgacatgcaatacaacaatatttatcggatgaccaatatacgatgcgtttcactgatatttaccctcacacaaaaaatatggtcaatttaacagcttacctccctagacaacttggtatacaaagtaacacattcctattgttaaataacatataacacctccgtatcgagatcttctattgttaaaaaatgtgaatatatatatatatatatctaacatcttattttgatatcgtcatgatcatatttaattaacattattcactgccaaaaagtttttcactgtgtaatgcccatcgatcatatcgtcatttgtttcattgcccagctccatcatatcaatcttcataaaccaaacccccttactccttagtatatatcacatgatttattctatcattttctctttgtttttattaaccctccatacatttttggacatttagcgtttggttttatgatttgtcttaatactagtcttccttgtcgctgcccattagcaattagttccatcacttgcataatctataactaactttttcaccttttagaattgtacatttcccaaacgaacaaatcaaataatccacatgatcttatctcttgctaaattcaagtattcatattacatattttatatttacttaaattgacgggccatgccgaggatacgagaattttttaatagaactaagcggatctcacacccttagcctaccgtccgactatggtccacaccaacattgataataatgcatttagaaaatggtatggaaaaatatttctatgaactctccaataatatttaatcttttgttcgaaagcattttattatttagaatatttttaaagaaaagaagccaattatcagggatttattcatccaaataatatagttatggagagctaaggtaaatagagttacagaacaaggatttataagatataaattacaccttaagttggtcgagattacaatatgttatgtctattcaagaataattacaactgctctcagtacttattttctttctcatatacatctaccattcttcttctggtgatataatgattaacgttgaattcagttgctatttcatgtctatttcgattaagcttagtttctatgagggactggttataatcagtatatgttcctctagaactttctttcaaaacacatttcacatcctatattcataaaactcgtaacgagacgagctaattcgttttaaatccatgtgtaccctaaagtttttaattacgaaatattctcgatggtccaaatatagacgataataaaaaggaaaaaaaaaactgaaattaggacaaggtcagattccaccgtacgttttgtaaaatggaattgaataaactaagggaataaataaatatcaatgaaaggtgagaagagtccaatattgttgaaagaacaataaatatcaaccgttaagaaggacataagccgaataccaacgagagccgtcaattcttcaccttcttctaacgtcaatgtctcaacgacgtcaaattacggcaagttggtgcatacctttctctccttctccaccgtcggtttttttaccccctccatttggcacgtttcaacaagatataaccaccctataaacaaaacaagatataaaccacttgtgttattcttcttaactttcgatttttcggttaggtttggttacagttttttcggctgatttttcccgaactagaacttataagctcgtccattatggtctacattgtttaactcacgtttatacatatttatcaaattgagaccgaaattgtaaattggttcattttttgttgttgtaaatttcaattgcagttaatttggttttctttgttttgtttcagtttagttcggttttggtgttttgaattgtgtgttggttatgaaattattaaatacgttttgatatttgttcaatttaaaatataagttgttaaatggggcagctccaaatcttacgaaactagatatatatctcaaaaatacatgcatgcgataatttacgaagtcgtagttatttgttacaatcatcattgcacatgcacagaaaaaggtatcttataaattactcaaatcaagtaaaaaatagtaggatccactatatagtcaccccaactatataaccatatagagaaacagtgtaatcaaaatctccctagaacggagattattttctatcactactttggtaaaactaaaacataattttctataagcaattatttccttcattgcatcattacaaaacttgatctcacatttcatgaacgatttacgatttttcgaatccgtcgattttggatcagacgtatttacgttttctatacaaacaaaatttaaaagaaaaagatgtaaaaattttgataccaaagagggcaaaatgaacatagacgcaaatcgcaacacttaccacacatcaaagttaacgccagattacatggacactacgggacccactcttttagcataccttcttgcaaaactgttactattttcacactcctaattaaaccattttaaaataaattattatcttacagcaagtaaaatatctacatggcttttccaagaccgttgattggtttaaattttaaattggcaaaatacagtacgcaatacactagtactagttgtcagaaaatgacaaaagaaaacccaatagtctgggagacacttggtctatcttaaaccgtcagatgtaaaaataataaatcctaatgacatctccggttaatcatgtgagtcggttcttgtcaccggcttacttgtttgtcagattctttacgtcgctgtataaccggctttaacccggtcatatatttaatttaattaatttcgatattttcgatcataaactcgtgcgcaacaaacccttccttgacatctgtatataaaagctcatctcctcactctctctctctccgcgttctactaaaataaaagtgaagcgccttcctcaggattttcccgagtgagtttcgctttcctccgagaaaatttcagacttaaattttccggtgagtttttcttcctctctttacctattttttttcttactaattcgttgaacccatcgattctcgtgacattacctttccactatccgatttgccatcttcaatgattcaatctcaagataattagtggattcaatttctcttatgatttacaggaatctaataaggagaagccattgttgaagaaactagtctctctgtttcgaatcttcaaattcagattcaatatctatcaggaaaatttcgcatgggggtgaaagtagcttcttcgtctactttccttcaatggactactcagcctattattcatcagtcttcttcaccatctcaaaccctagcttcgggaaccataacatctccttcaaaacgacgtagcacagtacacgacggccggtttctatcatgtcgtttcgtgacacagagactaaaccgttcggctcttttcggaactccgtcgacgaagcttcatcgacccaagtcatgtgagctatggaaatcatcatcatcatcatctagaccgatcaaaactcagtcgtttcgaagagtttatagcgcaaacttagatccattctccgacgaagagttctcgaaaaaaatccaagagctaactctcagattcaatatcccacaccatgacgacgacgagaattcaatcgagccgccatggaacgagatggttcatttgtcgagtattgaaatgaaagcaaacagtgttgatcttcctctttcacttcgtattataaagaagaaacgtcaatgggaagaaggagttaaacaagctggtgaatctgcgtgttgctcgatgaataaagctttttcttcaatggtgtttatgatacgggagcttcagagctttactttacatatgagagagattctgttctacgaagacttgcaagagattttgctaagagttagagaagagatgcaacaatctttcgtttggttgtttcaacaagttttctctgctactcctacgttgatggtttatgttatgattctcttagccaatttcactgtttattctatcggtaacaacagctccgctttagccgctgttgctcctcttcctccgacgattacggagttaacaactgttagtgaaacagaggaaacaaacgtgaagtttgattcctcggtggtgaaaacgttctttgtatcatctcctagtgggagtatagcttcagttggtggtaacaacaatggcggcggtggaaacgtcaagccggtgttaagcggaactgacggtgatggatccgatggatcagaacagttcagaacaatcatacccgaaggagtttctcaattgtcatcatcgaatttcgggtcagagccgtcagtatcgggacaagatgaacatagattgtggaattcgatggtggaggaagcagaacgaatgcagtattcaaatattgacgattcgttggatcaggagacgaggaagcggttcgtgtctcatgtagaggctcgagtagaagcagaggaagacactggttacttcaaaacagagctaatgtatcaaacagaactgtctcaagagcctaataatcctctactactcgctaactatgctcagttcctttacctcgtctctaatgaccatgacaggtaacactttaatcatgtgttttctaattaaattatgttaatcttagtttagcttaagtagatttggttattgagttagggtcgaatcttccttttagattcttttgggttgtgaatttctgaggctacaagttgatgcatagagtcaaaaataggcgcagacttcgatgattttttaattcactagtggggcagattgtggaaattcataattgtcataataatcgcatcagcagaatatacaccaaccaatttcttttcctctttgaggaaaaacgacattacacaaatatctaacagagaataaataaagaaaattataatgtaactctcagtcagtgttagggataagttctagccaatgagctttgagtctttgagggttttagtgatagtggagtttacggttgtgttttaaagactccccaccataacccaacaacaaaagtcgttacatcacaatttgtcttctagattttatctcccacccaaattaattaacccatgtttttgtcattagctttatacagttagttttttgttctagattgtagcattctttagaaaattgggcttaacaagcattatagattttagtgacacgatgaatggtttgatattattcctaaccgatccttatttgttagtatgatggctaaattgataattctttcacatttttgtaaccggtacctaattcatattatatggaaatttaattttcacacgtaacacttttggcgttattcatttcatcattaatacgttccacatgtctttacttatctctattgaataagttctcacgtgatttcatgtgtaacagagcggaagagtatttcaagagagcggtaggagtggaaccgaaagatgcagaggcgtttagcaaatatgcgacgttcttatggagagcacgggacgatctttgggcggctgaggagactttcttagaagcaattgatgccgatccgaccaactcttactacgccgctaattacgccaatttcttgtggaataccggcggtgatgacacgtgtttccctcttgatgacgagtctcatgaagacaccatttagataagaatgtgcaccatcaaagtctctctatataaaatattgtatacaataagtacaactaatgaatatacacatatgtgcataccattaatgtattatgtatatgcatgtttgtcaccaaggctcggtgggtaaaagagttatataatacttatggttgcgatcagtctagagaaaaggaagaaaatatcttggtttggtggtagttgaggcacgtgattatagcgcatgagatcgaacctgatctcaccgccttcatgagttatgactcataacttatgaatcttcggttgggcctatgtcgtggaaccaagtgtgtttactgtacacttttcttttttattggtttgcacatagagtactacgtacaaaactagtcaaaacactaaaatcgtaatgcaatttcggcatgtttttgttttactttatttatgtgccgtataactaaattgactaacttgcaattttgactctttgagattctaatcaaggtacaacgatactcaaatctttcactcaataccgtttaaggctttttagttatttcctctcgttaagttggtggagcagttgtttgattcattggtttgtcaatcacgttcttagacttggaaagaaatttcttattacatattgacattgtatatgagagacctagaagtgttcatatggaatgacatgtgttggtggctttggcatgttccttttcaatctatagattgagtcatagaggtctccaatggaatgaggttgtactgcactattacgaggatttatatcttgctcacgagccatgcaatgtccttttgtttgcttactcaacaaaccaaattgtcaccgttttgtgtcatgccactaagggtgaagatttacgaaatggcaatgcaataagccaattaattagaaacgacataatcatcgttatgattttaatgtacacgatggagttatgttcaatgcagtttggacctatgtaaatgcatgcatgacacgagttcatatgtaatgtctcacaggttattaatacgttctgtaatagctatgacatttgagtttatagaatcaaaatagagagtcataaaagttactacattacttctctaatcgaaatatcaacaagaaaagaaatttgtttatgcatccgtctaaaccagggattcgcatgtttgtagttgattttgttgagatatgggtgtctatcaaccgccatctcatggaatgtacactaaccaacatagaatcaaaaactcttaagcatgaaaaaaaagcatcaaatgaaatcgtttttcactctttcaattcttaattaacatttctctttcatttctgtaaaataattacgagagatattactttcatcattaatttcgtttttaaagcactaaatataccatttaaagtgtttactttagtttgacccccaaaaaaaagtgtttccttttagttttaaaaaaattatattcatagttgtctaccatattcttcctttaatcaattattcaacaaagggaatcttagtggttaacccctctatgatttggtcttgcgctaatgtttgttaatcaacatatatcgcattcaacaaaatcgactataacagaaactattagactaaatgctttttaatcaacatatatcgacgaaatcaacaataacataaactattaaactaaatgtttcggctggactatctttaactctttagtcacataacctctcaaactgtacctagatcattactcaccacaaagattttaccattttccaaacaaacctaaagcgtttcacacttcacaattgtaacaaaatataaacaaaaacacacaggatcacaaatccggttacacagtatacacaataacaaaacaaggaagcacagcccttggattaaaaaccaaaagctcatcatcgtcgatcctcaacagagccccactcttgttcccactctgcccaaccagagaatcataccctccaccatcactcttatccacgtcatcatcatcaatcaaatcacacccgacccgacccgctacaacccgacaaaccaacatggcccgtttcacattcataaacccaaactcttcttcaacctcctccggaaccgccacgtgtcctctccaccccgtcgccaacgtcgcgatcccgtcgagcttcggcgagaatccagatccgatgataccacagatactacaatactgatgaccacagagatttgatttaccgttttgccctaaatcacacataaacgtcgagcagtaaaatcgtaaaagttcgtttccgtcggcgacgcaacgttcatcgtcccaccgtcttccaccgccgttgctacgagcggctttagctttcacgaactcacgatactcttcgaatctggtgagaatctttgaactgttgtggatttttaagattcgattgatcaccggagatttgtaattaccttgctccggccaaccagatttgaatatgatcttgacgatgttcgtgcttgattctccggcgattagctccgacacggcgtgtttgatcgcgatgtgattctcgaggagattgatttttgggaaaatctcgccacacgagttacaagggaaaatctcgtcggaagaggagatctcgaattcggtttgctgatgaatacgtgtttccgggtcgggttggtttgtggtatcgggttggacgagagtgacgagggagttttgagatgatcttgcggatgttaaagtaacgttaggatgtgtttggttacgggatttggatatccttgtcgtggataagaaaactcgttttaaatacgtccaagaagaggatagagatgaaccagaagaagaagaaactcttctaagcttcttctttcttctcttttgtttatagtctgcgtctttagggaagaagaagcaaccgaggaagaggaagcatagagagaaaaagtattgacgtaacaacgaccctagttttcgagccgccattgatgagagactttagagttggtatgcacagagaaagatagagagaagcagagaaagttagtgaatgagagattttaccattggagaggtgtaaagaagaaggagaggagtgtaaaggagtatgaagacaggagatagatactaaaggtagaagaaagagtaggtgtgacgctatttttattttctattttttgtgttagaatatttgtctcctcactttagtttttatttggtttatttactcctattttttgtatgtttatgcgaatcttaccgatgcattggttcgtgtgtgcatatgagtgagtgtacgctttttttttttttttttcattcacggatgatcttatagtacattttggatgaaagttttaggtttatagaattctacttatgttttgtgaagaagaaaaaaacgaattcgaatgatgtttattatatatgccttttccctccatatatataattttttcttttatattatgaaactttggagccgaaattcatttatttagactggaatgagagtagataaattagttcattctataaggtgttgaactaggtaggggagttttaggtcacacaatttttttgacgaaaccttagttcgtcactaaaccacaagctcttctcataacatacttttgtggtatatatatatatactttttagttaacttggaaattttaggttttagactcatccgatgctgttagtattaatggatgatgatatcttctaaatttaattaatatattatataggcataaattattcctccatcttcaactaagttcgaacatgggtagccaataccaaactctacgtaccacacaccacatgagcaacccatgttgggtgtttagtggtattcattacacatttacactgatactcaatgttgtaacttctctatacagaatcattttctcttcatctttctatagaatgtattctccatttttttcttcaattatttgtacgatgttatgtaattacatttaaattattgtatacaatgtaaattataaagaagacaaactcgaaatttagaggaatccaaggctacacagaattattttattgatatgaatatttggtttcacaaatttttgttgcttaggatgcggacgtagacaggggaacacgtgcacatgtctcatttctaatctctgcgcctcatcagtgcatatgtgtttactaattagatccatgcacacatccatgcatttgatcataacaaattattaaaagaaaataaacaaagtgattttatttataaatgtttcattcagtttaattaggctttttatatatacagaacatgacaaaaaaaaattaggttaaggtttcgctttcaggagaagaaaagcgaaatattcaagtggcagttggaggtgctaagtttttgattcgtttagtttaatatgaatgttagtatataaatgttatcacgttcatgttttcatcacaatcaatcgtggttttgcctcaccattttatttttgttttggaaaatgtatattctaattactctgaatataactacatattgatgaaaactcgtcatatttgacactgagattatatataccatggaaattttgattagtagaaaaaagttgcgcctatttaaaattaattcgtaggctcatataggataacgattgaaggtcataaatcagattaattactaccacttggttggataaattattttcatcacattgtcggtagagaatatcacattgtacaaactaaaaaacgtattattttttctcatataaccaaatctagaaagtgtaatttggttatagcttagatgtcgtttagctaataaatatagaaataaaataatagagaaaggagagttagtgatgaatgattgaaatggtgaatgataattggagaagtgggccacgtgagagaagcatgtacttttggaaagtgggtcatttcgaagctcttcctgtctccatccacatgaagttggcattcttgtgtctttacggcctaagtttgcgtttctacctcttgagaaatgaatcttgccttcttgtttagtgactggtacggatctaatagtaacatgacaccatctcatatttctgaattggacgtctttgaattgaataccataacctaggttatagtctacacctacaatattacgtgccgatagatcaacatgcatgatccgtatagtttagtgatctcgttacgtcgttatatcaattggtgaaaatcatcaagtgtttttttaggagtgatgaattactggtacataaattttacgtttcgtttagattttggaagaccttgacgacacagtggtagatgttggtaaatggataacgcatgcaacaaagaaataacgatacaacaacaataatgatgacttaaaagaagaataaaataaataaaagtggcagtcataattcataaaagcctaagctaggaaattcttatggtagaccagaagggacaccttcgatgagtaaaatctgccgcaccacaatcttacatcattctcatcccctaaacttggacctcctccattaataaataagaaagctgcaaacgttaatcttctaattgtgattttgttacaagttttatagattctttgttctatctagctacatatatttcatacatttcactaatttacaaatatgtaagaatgtaatcaatgtaatcgactaagaatacatcaaacattaccaaatttgattgacatttacctctgtctattcgtcctcaacattattatcccatacgttcatacaaattgacattttacacttaattttgaatatcatgatcaatactctctcgcatgggatacttaatcaattgttggattaaatattctttcgcatctttgtgaacgcaattagtgggtggtttgggttccacctttggatcctgcctttattccacataaagtagatcactggtcatactcatatccttacggacaataaactattgttattggtattgccgtattattgtaattctattcataggtctacttccaaatctttgagatttttttttcattggggaagtaagatagatctcgcaatttatgctcgtaagctaacattatttgggccttatatgggctttatgttaaactgatagttaataatggacctccaatagttattctgttaaccgttacttcccgttagattatgacatcctcactcaaccaatacttaaacgccacatgtcgtcacatcagccacgaccttaaaaaaaaatcaattcctctctcttaaaacaaagaagaaaaaaacagagaagaagaagaaaaaatctatctccgccatgaacgcgagagctcttctttgctcttcaaatattcactctctctacacttcaaatcgtccacctgaaaaaacctcttcttctcgcagcctccgtaatctcaaaccatctccaaagtcgttacgggtatggatctacccgcgaaataggtccagtgttttccgggtattagttcggagctccgacaagagtgaaagcagtaattcgtattacgtagaaggagataaagtaagtggaaacaatgacgtcgtttctgattcgcctagctctatcgtcctcccatggtgggaagagtttccgaagcggtgggtgattgtgttactctgtttctcagcttttcttctctgcaatatggacagagtaagtagcaaaaaagattggatttttatggattgggaagagttattcaatttgggacagatgatgttttaacaggtgaatatgagtatagctatacttccgatgtcagctgagtatggttggaatccagcaacagttggtctgattcagtcttctttcttctggggttaccttcttacacaggtaatcttttttccctgattccttaattagggtttctatttttagatgatcaatgtttttttaaatgagtctcactagctttcacatttaaatcaaaagtgtagttgaatcagtggtttgttgatattatagatagctggtggaatttgggcagacactgtaggagggaaaagggttcttggattcggtgttatttggtggtcaatcgctacaattctcactcctgtagctgctaaactcggtcttccttacttgctcgttgttcgtgctttcatgggagttggagaggtttgtgattactcttagtgatgttagatatcagtctcggatttgtgtgtgttgataaggagaagtaagttctcatttgtgttctccagggtgttgcaatgcctgctatgaataatatattgtcgaagtgggttcctgtgcaagagagaagcagatcactcgcgcttgtttacagcggaatgtaccttggatctgtcaccggtttagccttttcgcctttcttgattcatcaatttggatggccttctgtgttttattctttcgggtctcttggaactgtatggttgactctgtggctaactaaggtcagactttttctactgttcttaactatttgtagatcccatatctcattaccattgacgatttgacgtgtgttgttacttgttataggcagagagttcaccattagaagatccaacattgctccctgaagaaagaaagctaattgcagacaactgtgctagcaaagagccagtgaagtcgatcccgtggaggctgatattgtcgaaaccaccggtttgggctctcatcagttgccacttttgtcacaactggggaacattcattctcttaacatggatgccaacttattaccatcaagtccgttatattactgtcttttaatcaagaggcttgatgttttatttgttttcttatcattaatcatatggacggttgtgaggcaggtgctgaagttcaaccttatggagtcaggacttctctctgtatttccatggatgacaatggcaatatctgcaaatgccggtggatggattgccgatacacttgtcagccgaggtttctctgtcacgaatgtccgcaaggtactttgtatatcacttcttctgttcttcagttccgttttgatgcaatctagtaaaagtgatacattcgataatcagtttctatgatgaaattcagataatgcaaacaatagggtttcttggaccagcgttcttcctaacacagctgaaacacatagattctcctacaatggctgttttgtgcatggcttgtagtcaggggactgatgcgttttcacagtctggtctatactctaaccatcaagacatcgctccaagatactctgtaagtttagtcaattactcccaagtcttaatgaatcatgctactcaaaagaaaatggattagcacattgatgttgttggtcttctcagggagtgttacttggtttgtctaatactgctggagtacttgccggagttcttggcacagctgcgactggtcacatactacaacacggtcagtactctcaaaacacttcgtaattctgacaatgctttgcttaatctttataaaatctcttctaagtttcattttttttgtgttttctcaatggaattaacaatgacatgaaatgcctcaggttcttgggatgacgttttcacgatttcggtcggtctttacctcgttgggaccgtcatttggaacctattttcaaccggagagaagataatcgattgatccattccgagaatagtaaatagttcggctccaagacctctcatcaggtgcaacttcacctcacgccagtctctgattatacaagtatcattgcagtctgagagctagccggaatattccttttttgccagaaaattcttcaggatctttctgctcgttgatttaggccaaacgcatatgaataatactttgtagatgaaagatatacagatgattttttgtaaataaacaaagctcacactttctcaagattactcaaaatctctcttcagctctatatatatttgtatcataaagatattacacgcaattctctaatatgctattgcgtagcaaacaagtgaccaagaaagagttttcgaaacttaaggtcataactaaaacttaagatttactgccacaggtagaatttgatcttgtgaaggaggaagaggagtttatgaattgtatgcagtcttctattgccgctgatctgtgattattatcattaacgacagagatgactgaaggctgagatatcccagaagaagaagccttcttcaatggtggagatctcttcttcttcttcttcctcatcaccaccagacgtaagcccataacgaatttacagctgagatctttgatcagtcttgctgctgtgcattccgttttcctcggtagcctcaaaccacagcttgttgtgcatcccggattcttataatatggtcccttgactgaggattgcttaccaggagttactggtctagtgtttgcattgaaccgttttgttcctgtagctgacatatcaagagagagtgagaacaaacttgaggagagtaagggattatatttatagggattgatgctgaacaagttgcctataagagttcaggtagagaccagagaagccatgattcttaataatgtatcaataatgacatgttaacacttaaagcaatgattactgtagacattcaaaacatatacaaataaaatataagcaggtaggttcaatttcatacttactttagatactttatgtcaaaaggattgtaataactaacagatctaaagatatcagaaacttaaacgccgaaatttggaaagcaaaggcagccatagagcaaaagaaaaagactgtttttagtttttctacatttccattagggaaagtaagtataagatggtccgcagaggtaataaaaccatttgtttaagcgataaaggttctttctttaaagcaacctttcggtattgttcctatttgatgatcactcaggtgtgtgcacagaagaaatgtgaacaaattcttttgactcctggagaggctgagataaactaacctttatatattgcagataccttacttgagacttgaggctacacaaaagtagagaaaaaaagagagaataagaagaacgaagtcaatggtgggcacaagaatatcagcaaggaaataataaccaagcaacttcatgacatacatagacatcaaagtctagagggtaatttgttacatgtgagaacattccattgagatcagaccaatgagtgatgactactcggtagttagatgctaatggaagttgattggcattatatggcaggttccaaattaatccaatcacgtcttagagaggaaagtgagaagctttaacataccattctaaccatagacctcaaagatatcttaatttgagacatgacgaccattagttccaataactcacgagtaaaatcactgaactttctagatcatgatcaactctgttgaactttaaactataagacaggaacattcacacacttgatgggtattcgataacatacagagacaagtaagaaaattgaaactcacattgttgatcttttaagcattattcacaagcaaaacctctccacctaaactcagattttgatccaagaaccctctaacttcatcatcatctctaaacagctgcggcacaacgagatcactatccaaattataccaaacaccattgatttttctaacaacaacccaatgcctacttctccaaagtccaccatatctcttaacaggaacattcaacacaatacccattaaagtatctgcatcatcaagatcaatcgaagaagctccaatacgcttatcatgccaaacaacactcttgccttttccttcaagagctgtaatcatcacgtttacgtcgtagttaccagtgattgtattgtggtgaggcttgaggacgaaagagagaggtgtccatgtttctttgtttggatcattggtctcgagcttctctgcgattgagttcaagctttctttagtgaatgcgtctttgtcctaaatcaaacgagatcactatcaaaaactctcaaatcggtgattcggaggatgaaattttgagattgaaatagaaattggatcaatcacctgaaatagattgttgaggcagtgcaagaggcaaaattgtaatcgttgtcgttcgtgatagattttagattcggaatccgccattttcgggagaattatagtgacgaaaattagggattagattgagagaaactaagcaagggcttggattggagtattctagcaatcgacacggtaagactttttttctcaattttcagatgaagaagacgacggtatcggatgagtattaaactacgagtcgttttttagtattttgaacataacatacatgctgtttttttctttaccagtcacaaagcctacgatcaaacataacaacgcccaggatttccaaaggaaacagtgtgccatctctgatctcttctctctctcactgcttttacatgaggttattaactgatcaaactgaaaatggtgaaggaagaggctcacaagcggccccaacgttacagacacatgatatagaaatagttcacatctctcatggttgatttagcagaaacattaaccatatgaaaccaaagcatgtcaaacacaggagctggtcaaatgagaaaccttcaaaactctatgtaacgtgtctaaatattggtattccagagtttcaggctcttgataattgtgtgatctcatatagcaggaaaatgagtacagaatgtgtaaccttttgatcattccggctcgaaaagctttctttcgcatttggtaaggtcgttttacttatgttctactgcaatatatcataatcttttacgtgttgactcgcacatttgtgtaaataaaagctgaacaatgagaattacagtggatcagtttcatgagcttcactttccctacacctgcccagtatgctttgctcaaagtgaacaactgatcatcccattatgtaaacaaacgagtataagttgaaaacatgatcataagttttaaaaatctgatttgtgcgagcagagtaatttcagcttatgccccaaaggtgcaaatgcatttttatcaatctggatgattttttgattgaattattccctactgttagtgacttagtgcatcagttaaagacttcttttatggctgtaagccaattaagctgaatctcttagctcataagaaactaactgttgaaaaccgtggaacgagactcgagcggcaacagtagcttcttctcctttagaaagctacaggaaaaaaaaaaaactgcacactccctgcgcaggcattaccctgttcaggttcaaagggactttctcagcctggtcccggatagcccgccttttcgcaggctatcctggttcaagcacccctggtgcttttgcatgtcaattcaccaaccaaatcacacaaaaaagtattgaaacatcaacttagattgtctttattgctgactctgactcaaatgaacagacaacatagatagttctaaaagtaacatgacatagagactactaagcttaccaacagtttgtgcctttatccaggtatagtccaacaggcaccaagacttgggtaagcaaggtcttgtttaaaacatttgcctgatgcagcagaagaaaaagaaacacgataaaaaacaaagatcacagtaaggactcatttaagagttgaccatatgttgcagatttaagaaaagattataaacctgaatgattttatactagcatgcagtaactaacatgtttgttgagaaagcaacgactaacagtctaaacatactgaccttttatttctgagcagctttgacatagctctctggcaaatatatttctccacctacttcaccgtgctgttctccgctaatggttttctttgcgatgttgaattcttcactcatagcatccattccttgtctgattgcttcttcagcactgccataaccattctcctctgcatactttcggatgtcttctgttatcttcatagagcagaattttggtccacacatggagcaaaagtgtgcaaccttggctccatcagctggaagagtttcatcatggaaagacatagcagtcatggggtccaacgacagagcaaattggtccatccatctaaactcaaaccgcgctttgctcagcgcatcgtcccatgcctgagcatgtggatgctgtttggctagatcagctgcatgagcggcgatcttgtatgctataaccccggccttcacatcgtccctgtttggtagcccaaggtgttcttttggtgttacatagcaaagaagagctgtacccaaggctccaatattggcagctccaatggcagaggtaatgtgatcatatccaggggcaatatcagtagtcaaaggaccaagggtgtagaatggtgcctcgttacaccactccaactgcttctgcatattctctggaatcttgtgcattgggacatgccctggcccttcattcatcacctggaaaagtagatataagtagttgtatccaaagacaaactggatgaatataagtgaattagataagtagttgtagtatacctgcacatctttttcccacgctcggcgagttagttcaccttgagtaaggagctctgcaaactgagcagtgtcgttagcatcataaatggagccaggtctcagaccatctccaatggaaagagccacatcatactggttacagatgtctagaatgtcatcccagtgctcgtaagcaaagttctccttgtggtaagctaagcaccatttagcatgaatggatcctccacgcgaaacgatcccggtcaaacgcttggcagttaagggaatgtaacgcagcaaaactccagcatggattgtgaaatagtctacaccttgctcagcttgttcaatcagagtctctctgaaaacctcccagttaagattctcagcaattccatccactttctcaagtgcttgataaataggcaccgtaccaacaggcacagctgaattccttaggatccactcacgtgtctcatggatgtgacgaccagttgagagatccatgattgtatcagctccccacatggttgcccactgaaccttgtagacttcctcttcaatagagctggcaacagcagagtttccgatattcgcattgaccttgaccaagaactttctaccaacaatcatcggttccagctccaaatgcttcttgttggaagggataatcgcccgtcctcgtgcaacttctgatcttacaaactcagggtctagcttctccctagtagcacagtagagcatttcctcagttatgatcccttgcttagcgtagtacatttgagtgtatcttggtgttcctagcttctcccgacgatcaatccactccttccttagcttagcaagccctgcttggtaagtttcatttatcgatagtcacataaaagagaggtgaatgtgtaaagtaaacacgaggtggaatcacataccaatgtgtgcattaacattttgaggaccactagtgtcataattatcaaaagctggctcaccaccagacaaatgaacacgacgaaagggaactttaagaacatgaccagattcttcatggacaacttccctgaaaacaaccaaaaaccaaccagtgatttctcaactcttccaatatgaaaaaatgtagattaagtgaagcaattacttgtgttctttagtgctcttaggaaagcattcttcaaaagatggaattggttgaaaatcaggagaagaaggatcaatggtgtgttttctctgcttagctctctcagaattagtggttggtggatcaaacgtcaaagtggctcttgtggttgttgtttccttcttgaatcgagtagcagcagcttgaacaacaacatcgaatccaggtaacaaagacgagtttggaagtttcggccgagcagagtgattcttgttgttgcatacgacggacatcaaggtacagtgtactgaagcagccatagctggagacaaacgaaaatatgaatcaatcaatcacagtttccgatacgatcaatggattaacagaaacacatcgaaatcgacgagcatgagaacaacaaagagtcgaatattgcatctaaacgcacaatcttaaaaaaaaagtttcatgcacataatattgaagaacaaatcggaatttcgccggagaaaatctacaaaactctctatcaaaaacatcgacaattgttggactaccatgcacattcatggagaaatcaaggattcgaacctggaagaggaagctttggatctgatctagtagacgaaggaagaagaggctggctcgtttttgaaatgaatcgcgcacactgagtgagtcagtggtactcagagtgattagggtcctttaaaaaaggaacgaacctcctgaatcgtctgaatattgtcacggcccaatgcagcctaaagcgaaaggcttgctgacgtgtcctctttctcagatattttgtcgaaaattggtgtccgttgatcaggatattaagataaggtacgtgaggaggagaacgtcgtttcacgagtaaaccaataaaaagtaaattaccttcattgaattaccattgtaatgtaaattggactgttactatgtaatagatgttggcaatgacaattgatataaccataaaaattgatttctcaatatctgttgttcaattattctgaaagcgacattgatattatgttttgtccacatattttgataaataatgcataacaatatgtaagtccatatcttgagagacatgatatttcaattcttttgagacgtaaatgacaattattatcagtttaactgaaatcaaatacagtcgatatattcattcaaagaaccacgaattaattgttcaaatcaaatcatatctagaaacattagaaaactcggaaaattattttaaaaatttatctacgaagagaattattcttcttaaatagaaagataatctcacaagtaacaacaaccattgacgcatttatattttgatatttaaacaaactaattgtatatcgtaaattcataatgtatatccaaagaatttatatcatgtttcgtatagaaattgtcatggtcttatcgttgggcttattacatgtgaaaagcccaatattaagaaatatgagaaataattgcaaaaactgcgaaaacaaagggacctaacctgcaattttatgtaagtaacacgatcaacaaattcaaaagtgtatgtaataagaagaaaataatatctttgaaaaacaacatgtaagcaactaactccctcgttgtttttctattttgtcttccccgcacgatccgatccgtacataaaaccatcccctctctaccacaccgacatcatgtttttaagaaaacagagaaatttttttctaaatctgcaattaaaacccctccaaaactattttgactggtaatcatttcaaaggtaagcttgacctctcttcttcatcaattttgaagttttccttcaatacctttgatcatttcgtgtgtgttttaggtcttataatgatttttatgtttcaggtttgtttgattcactagaaggagaagaaaatgggaaaatttgatgctaaagatgtttgctttatcgtttggaaaattcttagattctcaacgaaaacaattttcagatacgtgaagagatacccaattgtttctggtgtttctacgtttttgatcatcttgtacacttttcttccttgggttttctattttttgctctgttcttctcctttgatagcttttgcttcgttttatatacggaatcatgatctgagttcgaagatttgtgatgaagacaagagaaaggatcgtgggttatctacgatttctcaagagggaagaacagagaaggctaagttaaagcatcaacaaagtgttagacgaaatgcaagaaggaaagttgaagaggttgggaaagattgggattcgtctcaagctagtgaggatgagagaggtaaggttattctgactactctctatggagaagtattaccggagacgattacaccagatatggagaaattcaagagagaaaggacgttgcttgttgcagaagaaaacgtatttgactctgttcttgacaatcacagagatcttgttgaattagagaggctaataagtgttgatggtgatgatgaaagtgaagttgaatgttcatcatcatcatcatcggaaggagaaaaggaagaagaagaaaggcgtgaagatgtaagcaaggttgtagtggcgtggacagaggatgatcagaagaatttgatggatcttgggacatctgagatcgaacgaaacaagaggttagagaatttgatttctagaagaaggtcaaggagatttttcttacttgcagctgaaggaagcttgatggatgatatggaagttcctcggatttgtattggtcgaaacttttatggtttcgataaaggaaactacgaaatcgatggacttgtcatgccaggctctgcaccttccgttttattaccaagaagaaacccatttgaccttccttacgatccgttggaagagaaaccaaacctaacaggagatagttttcaacaagagtttgctgagactaaccctaaagatatcttcttttgccgccatgagagcttccatcacagagcttttccatcagaatctcaaaatgattctaaatttacgtctttgtggagaaatgtagttgatggtaggcctaggccactacaaggtatgacattttacagttttgttagtgacctaatcaggatcatgattaggctttctataattcttagtgatttttcttgttgatttaggtagcaataatcaggaacctctaatgaaagagagagagaaaggaaatgatatggaggcaggagaggtacggatagagacagattccatcagaaacgatgatagtgactcgaacgcatcgctttctccacgagaaagagagaaggatttcaatgtctcagaccaatcagatgcttctggaactttctgcaaacgaaatgatcgtgttggaaactctgttgcgggtttagtgcctagaagcagtggttcgagttcactagcaaccgcgaggcaaagatacatggagcattttggttacaatacaagaaaatgtcatatggtgacacattctgttgactctgatcttcaagttgaggtttctgaacttggatcacctccaacttcagttgatggtaatgactctgattatgaaagatctctgtttgtttatgaatcggagatgggaaaagaaatgggttataatggtgtggaatctgaagtcttacttgtggggaaagatgatcaagatcaaaatgaaacaacttctttagcttctccagaaaatgaagaagcaagaaacttggagcccacggttcctcaatcggattccgctttcttcaaaagagatgaggttagttcatgtttttttttgaagtcatgaaaatggtataaatgtttagacattgaacataatctttgcaaatttttgtcaggagttgaaggaactttccgagaactcagctgatgagataaagataagttatgactctgacgaacatgaaccatccgagaggacgactgatcaagaatttgaagaaccttatgagagaaatgatggagaagaaaggcaacaactcgtggaagctgaagcttctgatgtaaatcatcatggaaactctgaagaatctgttacttctccaagatcagtgttaccagacatgttacatctagaccagactgcttgggaggttctggatcatgcatctaatggtcagctgcaaaatgtggatccaccagctgaatcatctcattatcaattagatgtaagttccaaatttcctaaagcagaacacaatttctaagcacacacatgtactttgtttgacgcgtggatttgttattttttcttttgcagggacgtatttatgccacaggaacaattcaggagaatcaagaggtgaacacttagccatttccaaacttacagttctctgtatatacttgatcaaaagtgtatagttattcttgtgcttaacactgaacaaaaactagcagggatttgaagtaacattcaatgatgagtctaattctgcagaagaccacagacagtccatcgatccattggctgtagaacttgagaacaatcaaaccgatggaatcaattgatgaaatggtaagcttgagataatttcgttaaataaaatcaaattgttttcttatgatatttaagactcttataagcttttggttcttacttttacaaggaacacaatctgattctctttcctttgttctccagttccgatagcatttactgaaagtcaacaaagaaccaagtcattttggtttatagactcaaacaccaaagatagttgcagataccaaatttacagtgctaatatgcattgttaaaaaggcgtaatgaatgataaggttttctgtagataggaattttatgttttttgtcgtataataaaatgtatgtttcatacaaaagtatagcgagagagtgtataggtttcttgttgtatgttttgcttccttagagcgcaaggcatatgaggagatcctcttaaatcatgtttgttttcttcagctatatattttcaaatccaacggttaactaaataacttcgttttgctaatctctaaaccaaaaccaattccacactttcatattgtagttacccataaaacgatctgttaactaaatcactctgttttgcttcataattaaaccaaaattttatattgctcatagattagaagcagattaggtttcattagtgtaaactgatctgcttaattacacaaaagtcatatgtatctaaaagcaaacaggaagaatttgggacccaaaagactaaagatgcatttcaacaagtctcataagaatttttgtataaaaggctaaaagagtggccaactctacacaaggctaagttcctgaaaccctaactaagacttgaggctaaagaaactatctgaaacaccagaattcatcatcaatagtccaaagtccaaactcatcacagaaacatacctgcaagcgtaacatcaaaccataacagttcgacaaagctcaatgacatgcctcatcggcaagtcccttgacacaatcgagactgatttaaccaccccccaaatctgatctccttgacgtgtttccaacgcaatctctacgcaccaaatttcggaagaagactcagaacagtcgcccccgcccaaaatcaccaacttcccatcaaaattcgccaacgtagacctatattcacagagaataggcaaatgagcagtatctacacccatcacaggtctccaaacgaattcattcggataatataccactattggatgttcaagagcacacgtaagatcaagtgcatacaacaaatctccaaccacacaagacgacaccgagtgccaaaatctcatcaactcactttcctcaccccatgactcccataaaccttgtactggttcgtaagaacggattctgtgtaattgtaaagcgatgttgctctgacgaagaaagaaccagcttgggcgagtatacgcttggaatgcgattaaggcataaagaaccggtttggtgaagctgaggagcgagcgcgttacgtagtagaaatgatccgaattgattacttgacgaaaggtttcgcagacgagaattggcgacggggaataacattgtgggaagtgtgcgatgattctttcgatgagttcttctggaagttgtagaagaatcggaagattctcgttatgtatcttttgttcttgaggattctcgttatgtatcttttcttcttcttgatgaaccggaagattctcgttatgtatcttttgttcttgagggttctcgttatgtatcttttgttcttgaggattctcgttatgtatcttttccttcttgatgaaccggaagattctcgttatgtatcttttgttcttcttgatgaatcggaagattctttacttcttcgtcttcttcttgaggattgttgtttggatcggcaccattagggtcgccgggaatttcagagagttcaaccatcgccgccgtgtgacgttagtaggagcaacgaattaactgaaagattaaagagagcctgaaattcgatatttgtaaaaaagaaaacaaaagttgttttgtgtatttatagggaaaccaaaatgtctttggtacgtcattgcaagcatcgcgttcagaaacttcgtttcaaaaaaaggtttcattaaaaaatataattccaaattacaatcacaatgttttattgaataatcacaatgtgactcattcgaaattacagaagggataatatcataaaaggaagtattgttagggatctttttttttttttggtgggttattgttaggaatctttacgtacttgcttttattttcaatgtttttttcaatagaatttctattttaggggaatattatacatataatttctccaataatagttggtcaaagaaattcactctaaaacttgcatatgatttattttttattttttttatcagcaaagaaattttagaaaagtattattttagccaattaagaaaacatatataaacaatttatatataaaaggatttcatatgaattaaaatgatgataaaatatcaaaccaaatcatacggagttcaagtaaaccaaaccaaaccaagaaatgatgagattatgattaaccaatgaaaactagacacgtgtgctctccttccctaaaaactagcttccctaaaaactcgcctctctcattttaattctgtttagaaccccgccaaaaccagcgtgacttatatgtaaagggctttagccattttctaggaatcaatcaatcaaacacatattatcttcttcaatctccttatttctatcgatcatcatcatcttccgtcaactccaaatcttagatcttcgaggtgatccttcaccttctggactttgatttacccttatctcgtactcttggtgagtactgattcgggatttatcataccctatttgtactgtttcagaacaaccaaccacatcgccaactgcgagccaccgtgaaaccctaactcagatccactttgcagtctatttgtactgccacgcgcctagctctttgttttgatattttccctagaatttcgcacatttctaacttcccatacgccatacaacgaaattctccaagtgaatattgaatcttgtatatttataatctttcgttcctgaaagagactcatatcttttttttttggtcaggtttcctccaaagttatgagcgaaccatgtcgtctcaatcttctctgcagctgcaatcgtcgtaacgtttcagagaccatagacactgtattgatgttttctacacaaatctctaaaacattcatgattctctggaagcttattgagttattgttatctactctatctcatatggtacgattattgttattcttctgtttcagataaagaacataatcgcgacatgtatccgcaagtacatgagtctggaagaaacagtgaattatatgcaggaaaatcacaagattagtcaccatctcaccaaaccaagtatgtgttatataatctcttaatctgtttgaattgattttgtgcttgtttataaagaattcagttttgtttcttttattagtatgggagcagcttcagaaagagaatgcagattttttcaacaagtaccacttaatacgcgaattagcgcgtcaaataaaattgtttaatagttttcttggaaagcaagtttctctgatgctcgagaatggagattttgatattagtactgcaacatgtacgtataacacaaggactaaaatctctaaataacgttcattagttttttgaaaattgggtttgttctgctttgtttgataactctttgcattatgcagctgataggtcagagttgagcactttaaacatgggaatgtcggcattggatgatacaaatggtctaacaggtaaagtcgaaaactcgatttcttgcacttttgacatgtaagaattcccttatgtttctctcttttgtagtaaaccagtcgcagaatcctaatgatcagcactatcaatttcattcttgtcagtggccaactacaactaatcatataccttgtaagcaaagactcaaacctttctctctttctgaatattgagtttgtaggtcatgattgcagctgggcaaaaactcgattatatatttcacttttgatttctaaagcttcctttggtttctctgtcttgtagtaaaccagttgccgattcctaatggtcagcaaaatcatatatggtctacaccaaataatcatgcttgtaaagaagagactcaatctttctctcttaatctatcatttgtttaacacttctagtacttgaccatttttttatgaataactcaactttctttctccataggtaccaatcttggagcttctaccattccaccagcagctaatgatcaatggtttccttataaggatcctgcgtgtaaagaaaacactcaacctttctcccttaatctctcatatgtttatcacttgtacttcaacattattatgaatgactcaactttatttctccataggttcccatcttggagctcctatcgttccaccagaagcttatggtcaattgttgccatatactgatcttgcgtgtaaagaaaacactcaacctttatctctcatagtttaaacccttttcgcatcaaagattttgaatgaatcactcttccttttttcctccatagattactatccagtactatattcaaccgctgcaccagcagctactactcaatggccgacatctactgattttgcttgtaaataatagacttattaatcttcctttctcattatattgttttgtaactcttctacttaagcatttgtatgattcattctcctttctctttcccttagatactggaggtccaactcttccaaaagcacctactgcggcatttgatcattttagagatggtttcggagaagatattgacaatagcagcccaaatttccagcagatggatcctttagcagccgcactacaaacgctacccgatgacatgctacaagagctatatcaacaatgccaacggcaatcgcagcttcaacagaacttctcactagaagagcagcaaagacttcaaagtaaagtaaacaacaacgggcttcaaggagtagtaaggccacccgaaaagccgccacaagacctatatggacaatgtcaaccgcaatcgcagctgcaacagaacctctcagtagaagagctgcaaagacttgaagttgaatatcgagcaaacagcaacgagctgcaaggagtaataccgcagcaacaacatcatcaggaacaagaagcaatgcagacacaaggagatccactgaatcgaatacctgttcaatctgaagctt

SEQ ID NO: 306 - DNA, 18372 bp, Arabidopsis thaliana
acctcaaaattttattttgcacgtatccgtgctctaattttattccacttctaatttcacgacagattattctttgtggatatgctcctattttgttagaaaaaaatgttgttgctagattttagatacttttgaaatgttgttagataaattattgtctatcgtaaaatcccaaaaaagtagtattatatacttacttctcctatataatatttgtgatcatttcacttctcaaaaagaaaaacaaagatcatctcctaaaaccagtttgaagaaaaaccataatcatccttcgtaagtttctcgtatgcatttttatataataatctacactacaatttctcttgatccatatgaaagatttctttatgtttttattttctttttttctttagaatggaatcaggagaccaggcaggagagacgtcaaaaaagaaaaagaaaggcccatatatgtcatggtcagatcaagaatgttatgagttaacggctatattagttgatgctatcaaacgaggctggcgtgacaaaaatggtaccataagcaaaactacggtagagagaaaaatactacctcttctaaataaaaagtttaaatgtaataagacttacacaaattatttaagtcgaatgaagtctatgaaaaaggagtattctgtgtatgctgcacttttttggtttagttctggttttggatgggatcccatcacaaaacaatttacagctccagatgatgtgtgggcagcctatttgatggtaactctcttttggttaacttcaccaaatttagatattttctgtcattattgataactaataaatatataatattttctcaggggcatccaaatcatcatcacatgcgaaccagcactttcgaagattttgaggatttgcaactgattttcgaaagtgctatagcaaagggaaacaacgcgtttggacttggtggtgattcaaatgctgaaacttttgaagaagaagatgatcttcaagcaggggataatgtgaaccatatggagattaatgacgacgaggtaaatgaaacacttcctaaagaaaagctgcctactaggaaaagatctaaaactaatcgtaacggagatcggtcagattcaataaatcatggtgagtcttcagagaaggtgctatctgaaatgattggagttggcactaacatcataaatcttattcaacaaagagaagaaagacatcaaagagaagttgagtttagggaaactgagaaaaaaaagaacaatgtttgggatgctatcaaggagatcccggatctggaagatcacatccgctatgatgcagtgaccaagatccacacattgaatttgaaagacgtatttgtgagcatgtctgttgaagaacgcttgggttggattcgtcgtaacacttaattagctttttattttcgatgcccttaataaaacaatacttaatttagcatgaaagactagttaccagttatttttaccaatgtcctaaagatagtcacatgccactatcattttgccgtgtgggactaataaaaaaaatgtagtgttatagaatacacatacatgtgtcttcactttacattatatacattaaattttgattgattttttttcttttcttttctaaatcaattatgaatttctttgaatgcaattatagatataaacttttactttctcaataaaactttagagaagacattaatagaagaagttttatcttagccaaataagaaaacatatatgtacatttagatataaatctatataatataagataaaatgatgaaacaaagaaatgatgagattgtgattatatatgaacatgacattgaccttctgtcacggcgtcgtttaaagctgaaagttaaagaagcaaatccaacaaaaattctgacaaaaaggcgcccttttgtttctttgaaatttggtgggacccacatgcttttgcagactaataataattattttcttcatccgtttggcacacacactctcttcctttattgctttttgcgaaactcctcctctctctcacaattgaatcaggacgatccaattgaatcgctatttttcttctccttcgtatgcctgatccctgtgagtattctgcatttaacattcatcttcacaattgattctaattcctcttttgttgttttcgattgtttggagattttaactgatttgagtttttttttttctctttctgggggttgaattgtggttgggattgggaaagttgttttctcggtgaaaaattaattgaaaatctgagaagattgattgcatatgcagcaacttaagaaaacgtaaatgcaaatttatctctggtaacaacattgtttgttggtgatttaatgtttgctctctactctttggtttatgaaattgcaggattggtttattaagcgtcactgttgttggattttgaggaagatgaaagcaaacaatgtctaggctaagtaaagacattgattcagcgtttcaaggtgttggaaccaaaaggtatatacttgtttattagaatccatggacattttttttgttgtttctcattatgtgtttaaaccatttttgtttgggtatagtggcttggagatttggtgcgtttataataaacagcttatttctatccctaagtcttcttttggaaaatttcactctggaaatgcataccttgttcttagagtaagctgtttctctcacttcatttttctacttgggacaaattagtgttcctaatgatacttagtttctcatggatatgtagacgtttttgcggaagatcgaatctccccagtatgacattcactattggctaggaattgatgcaaatgaggtttgtatgatcactaatgtacattttatacgatggttatgaaaatctggtgttttgagatcgttatgcccattttacatgaaggtggattcaattttggcatcagacaaagcattagatttagatgccgcacttggatgttgtacggtgcaataccgtgaagttcaaggtcaagagactgagaagtttctctcttacttcaaaccttgtattatacctgttgaaggcaagtattccccaaaaactggaattgctggcgagacataccaagtcaccttgctaaggtgcaagggagatcatgttgttcgtgttaaagaggtaatatgtgtttgcattaggattctttgaagcaaaaagataaagttgcagtttatttacattcttcaagctgactttgattggtcaatctatgcaaggtgccttttcttcggtcatcactgaaccatgacgatgtcttcattctggatactgcgtcaaaggtttttctttttgctggttgtaactcaagcactcaggaaaaagctaaagcgatggaggttgtggaatatataaaggataacaagcatgacggaagatgtgaggtcgcgactatcggttagatatttttcatgttgagctcctctttttagactaaatgactgaaagaaaagcgacagctgatcatttcggtttttttgtagaggatggaaaattttcaggtgattcagatgctggggaattctggtctttctttggtggttatgctcccattcccaagctttcatcttctaccacccaagaacaaactcagactccatgtgcagaattgttctggtgagaattggctttatatactcacaatggttttgttcttttcaacatttagcagtaaaagccgaaattcctgtgctttgaggacctgctgttaatccattattaatcatctaaagatctttgattaacaggatagatactaagggaaatctacatccaactggaacaagttctttggacaaggacatgcttgagaagaacaaatgctacatgctggactgtcacagtgaagtatttgtttggatgggaagaaacacatcacttacagaaaggaagacatccatttcttcctcagaagtaagtaaatattggtaatataacatttttacatgactttggtgtcttaatttgtcgtttcgcatgtgtttcatttagtttctgccagagcatctgagaggccattcttaatatatgatatgatgttgctttgctctaggaatttctacgaaaggagggacgctcgacgaccacaagtttagtacttctaacagaaggactagaaaatgccagattcaggtcattttttaacaaatggcctcagaccgtggagtctagcctctacaatgaaggtcgagaaaaagtggctggtctgtttcatatttctctggttctgtaaagaagataaaaaaatttgcttaagaaacaaaaagatactaaagtaaaaatctgaatacttttgtgcagcgttgttcaaacaaaaaggatatgacgttgaggagcttcctgatgaagaagatgaccctctctacacaaactgccgagacaacctcaaggtacctcataccaaactgtcacatatctgagcataagcctgaataatgggattctttaactaatttcaggtttggcgtgtagatggtgatgacgtctcgcttctctctattcctgaccagacaaagctattcaccggcgattgctatcttgtgcagtataaatatacttataaagaaagaaccgaacatcttttatatgtatggatcggttgtgaaagcatacaggtacgcaggctatataggctttgacatttttttgttttcatatttttctttgttccactatgaacttcattctgttttttgacttcattgcagcaagatagagctgatgccataaccaatgctagtgccattgttggtacaaccaagggtgaatctgtactggttagttcctagccagggccgaaaaaataaatcacacgttttcttttcttttctttttggttcaagactgtaaacctactgacctgtttcattcaacattctttatccagtgtcatatatatcagggaaacgaaccttctcggttttttccaatgttccagtcactggttgtttttaagggcggtttgagtagacggtacaaagtgcttctagcagagaaggaaaagataggggaagaatataatgagaacaaggcttctcttttccgtgttgtaggaacaagcccaagaaacatgcaagcaatccaagtgaatctagtgggttctttagtactttcactactcttacatacctttcactatttgttaagcaaatgaaaatcgtccccccgcaggttgcaacctccttgaactcatcctactcttacattttacaatatggagcttctgccttcacttggattgggaaactttcatcagactctgatcatgaagttcttgacagaatgctatatttccttgatgtaagtaacttttagctctcagctgctgtttactaagttcatgccatacattgattctggtttattaagggttatgttcagtattactagtaacaaaatctatttcttcgtttccgtctgcagacatcttgtcaacctatatacatcagggaaggaaatgaaacagacacattttggaatttgcttggtggtaagtcagagtacccaaaagaaaaggaaatgagaaaacaaatagaagaaccacatttatttacatgttcatgcagttcaggtaatggtaaatatctttcaatttctttttatcatcttacattattgtttagttctgccttggttcagctataaattaacgaaatagtggtccacgactttggctcttctgttcagatgtactcaaggtactattcatgtgtgtattgatgctattatttaaagtgattagagatcatctgggaatgaatactcttatctgatagccactttgtgcatgattttcaggtgaaagaaatatacaattttgtgcaagatgatttaactactgaagatgtatttctattggactgccaaagtgaagtatatgtctggattggatcaaactcaaacataaagtcgaaggaagaagctcttactcttggtctggtaattttcatctttgtttggccttccaagtgctttttttgctgtttacgggtggaacttcagtaaaaatgggatcaaaacatcatatggcataaataaattttaagaatggcgaactcggggttaccgaatatggcttcctttttcagtgtttcttagtccattgtacttatgagattgcagaaattcctagagatggatatactggaagaaggtctaaccatgaggactcctgtatatgttgtcacagaaggccacgagccaccatttttcacccgtttctttgagtgggttcctgaaaaggcaaacgtaagaaatcttttcccatcttgaagtcacctcaaaccgaacgttaggaaattccaaaatgttttgatagtagtctacttagtttcaagttttgggtttgtgtatactttcactaataatatgcgtggaaacattgcagatgcatggtaattcatttgaaaggaagcttgctagtttgaaaggaaagaagacaagcactaaggtcagtcacagccaaatataagaatgatcattgtgtttttaagtagctaaacatttgtgctttcagagatctagtggaagccagtatagatcacagtcaaaggataatgcatcacgtgatttacaaagtcgatctgtgagctcaaacggatcggagcgaggagtatcaccttgctccagcgaaaagcttttgagtttgagctctgcagaagacatgacaaacagcagtaactcaactccagttgtcaaaaagcttttctcagaatctcttttagtggatcctaatgatggtaaggtttcatatgtcaaccttttcactgagcgtcttggttatatgactcacaagtatcagaaaagtataacacagtttcaagttaactcattgatgaaagcattgtagaaacaacaaactatgtcaattttcttctttactattggatccttcaaatccttatatcaaagcactgtttttttatgcaggagtggcgagacaagagtcgagttccaagtcggacatttctaaacagaagccacgcgttggaatcaatagcgatcttagtagtctagagtcacttgcatattcatatgaacagctcagagttgattctcagaagccagtgacggatatagatgcaacaagaagagaggtaaaaccctgcaatttcatatagaaatttagctctcttatatacaccacatgaatacttcaatgcaattttatctcttcaggcgtacttaacagagaaagagtttgaagagagatttggaatggcgaaatctgagttctatgcacttccaaagtggaaacagaataaactcaaaatatctcttcatcttttctaaaaacctagagtaagatctttgcaacaaagctatttttttgggtcttaccaaatgtaaaaactgtaatgtttttgtttattgcaatgacctcctgatatataagtttgaggctagcctgttacaaaatcacaacaccaaacaaaaagacacctaaatatggaccacatgccttcatgggtcatagtttcatactgcaaccaaacgacgtcgtatttggggaatgacttgaataaaactcacaaaattcagttcttaataaaagaaatctgaaaaaggtacgacctttagcttcttctgatccttcatcatcttcatcgaatttgtcaatttgacttgccaaagctgaaatctttgagtacccaatggatcgaaatcaaagacccagaagcattttggattcattaggtgaagaactcatcgcaatcctcacacctgtctcgatttgtatgttcaccgttgttcttctggtctgtatcctaaactccgacccttcttcttcctccgcttctttctcctctatagccaccgcagcttactctgagagcgattcagattcctcatgggacaaattcgtaggtgcccttttgaattctgtcgtcttcgtcgctgcaatcactgttgcaacatttgttctcgtccttctcttttatctccgatgtgttaaattcttgaaattctacatgggtttctcagcttttatcgttttagggaacttaggtggagaaatcttagttttattgatagatcgatttagattcccgattgattctatcacgtttttgatacttctcttcaatttctccgtcgttggtgttttcgctgtgttcatgtcgaagttttcgattttgatcactcaaggttacttggtttggattggtgttttagttgcttacttcttcacgttgttacctgaatggactacttgggttcttctcgtagctttggcactttatgacattgctgctgttcttttacctgttggtccattacgtcttcttgttgaaatggctatatctagagacgaagacatcccggctttggtttacgaagcacggcctgtgatccgaaatgattcccgttcggttcagagaagagtttggagagaacaaagatctagccagaacaacgctaatcgaaatgaagtaagggtggttgaatcagcagaagtagaagaagaacatgttggttcaagtgaaagagcagagatatctgtgccgttgattgatagaagacctgagcaagctgagaattcagagacttttcttgaaggaattgggttgggatcatcaggtgctatcaagttagggcttggggatttcatcttctatagtgttttggttggaagagctgcaatgtatgatctgatgacggtttacgcttgttacttggcgatcatagctggtttagggatcacattgatgctattgtctgtgtatcagaaggctttaccagctcttcctgtatcgatcatgttaggtgttgtgttttactttttggcgcggttgttgcttgaagttttcgttgtgcaatgttcttctaaccttgtgatgttctaactgtatggaatgtgaaagggtggttttgagtacagtttcatttgtttcgtcaaaacaattttgttggtttgattgatgtatcatttgtatagtgtgctcgtcctagactttgagttcaaatcaagtttttttataaattaaaattagaatttgatacacatgttttgcatcacgtaaataaacaaagtctaacaagtaaatagatgaggagaagataaatcagaagaaatggattctacagtttgatgaaactctgggaagcttcataagagcatcagtgattctgaggtatttgttgtcaacatcgttgtcttctcggtgattcatttcaacaccaacattgacagtttcaagacatttcaaatttcccaagaaatgcctcatctgtttcagctctctacatgtaccttgataccctgaaatatgtagcaccttcacttgacaagtcgataaacagcatattcccaattccttcttcttcttcttcatcctcttaggtatacaagggcaggcgtccccgcatctacgtgtaacttggtgcacaagaccctgataccaaaaaggaatattgatgtacaataatagatagcctaggaaagaaatagaactgtgttgatcggacgagaataatgatataccttgatgactaaagtctctaggttaggagacttattgatgagaagtggcaacactggccagcctcttttttggcactctcaaaagataaagtaaggaggttgtgaaacaccggcattgatttacaacaaaagtagaacacctggattttaaatatcacacaataagaagactttgcaagctagaatgcacttcaaattgaaacaataacaagtaggggaaactaacctcgagagaatcaggagacaagtgaagggttttaatgttgcttagtcctgtaaccagattggtaacatcacccaaaataggatcatctggatattcctcatcatcataaacactatcacagtcaccataaccaccagccttctcatctctaaggcgctcccatgatcgaagatcgagtctagcttctacaagggaacctaaatcaacctcataccaatccgggacatagctagaatagtcaaggtacacgagatttggtgtccggaaccaacaaccatcgtgtgcctcacggtaattgggaaaatggtgaacgatggttagtcgtttgatggaaggactcgaaactagcgcattccaaaccgggggaatttcaatttcatcattacgtagtaagaattcctcaagcaaagggcagccagagatgaaaagttcatacatatcagaatctacaaacgtcattagaacgagagagagtgttttaagctttgggaaaaacacgccaccaggaggaagaagaccatcaggagaaaacccaccggttatagtgagctcaacaagtgtgttgctcgtgaagaactcagtgtctatagtatacaaactttgagcgttcaagtaaagttgcaagcagccgcgctcgaggaaactgcgaatccaagtgttcacttgagactcgccatactgaaattcattattcagagaggttctcttaatggtggtagaatttgttaagagggcaagtgttttatctatgaattcagggaagcctccaggaccaccaattgcgtcattgatatcaagcttgtctacaagagcaggcagattgttccaccttttagacagaacagctgtggaagcagcacgttttgtcggaagcaaagacaggactttgccaagaatttcatctggcagactgctaattaaatctctggaacccatatatagaacctatacaaggagaatcaaaaaaaaaatcgattattagaacccaaattaagttcagacaggtaaaatcaacagatctaattgatcaaattggtgatgatttgagattttaataagaaaattaaacgttaacttacgactggaaacgaaacgcaaaagaagggatgtgaaagaagaagcttgcttttgggtgaacaggaagatcaaagaaacagcttactttttgggtgacgacgacaatggatttctcaagagagagagagtcggacaacgagaactccatttttttttttttttcctctcttatatataataataagatagcgatgtcacctttttttgtttttctcaacaatcgataatccctggattctaacatggtttatagtttttgattttccaaaaaaaccattttaatatatttttttccttttccaatttaatagttgtggtggtgggttcttttccatgaatgggtggatgctgttttgtaagtcagtctttggaattggtttctagtttttcgattttagattttgatttttgagaaaaaataatataaataaggtcaaattttgaattttaaataatgcaaacgtattttcctaaattttagggacaccaaattttataaacttgactggttcgacatattaatagtttttgaaaaaacaaaaaccaaaaactcttctaaaacctatagtttttagttattggattttacaaaataaagaaataaaaaatatacaattgtcaagttaagaattttgtttaggaaaagtgaaaagtcaaataaaatggaatttagattgtcaatgaagattgttaaaatcttcccaaaactagaaccaacttttccaaaatcttgaatgagtaaaaaatgagttttttaaaaacaaaaactagtaaaacattcaaggccaatcaaggatcctaaaaaaatagaaaactcagtttttgatggcttttacaaatttttaaacaaaatccaaaatctatttccaaaagattttgagaatgtgatgcaacttctttttgtttttcacttttttttttactttgatcaatttcctaaatcttttagtgctcaatcttttgttctaggcaaaaattagtgggccaagcgagaatggctaccaggtcatttcggtctattgttataatggccgaaatgttgataatgtgtaatcaacgagggttaaaaagaagcaagataatttggtcgccggttgagcataacatgttatcattcatgctataaccaaccaaactgtattatacctaaacgaagcctcttataaaattggcatgtagagtgaagtgagccactcaaaccaaaatatgtacaaaattagcaatggaagcagcaaaaagaatcacactacaagtttcagctcacaacatgtaatgtagcttatctaaacaccctagaaaagaagctataatatttgccactaaaaatacgctataatatttgccactagacaatcgctataatattcaccaccaaacaccagtcacatagtctgtgataaggcactaaacaccagtcctatagtctgtgataagattttgtcccagttgattcttctctacagactttgaaccatacttttctctatagaaaggagaccttgcagtcttcattgctcctgttatggcaaagccaaaaaacaaaaacaaaagtgcgaatcaacaacacagtaattatctacaaattctctgtttttgaagcaacgacttaatcctgtttctttttcccaggccattacatcgtctgtgataacagttccttccattggtttcttcttgtgagaaaattaaaccagcaaataggactttatatagttaccggggtgagagatgatataacttttatgtcaaaaaaatgaaccttcttggtgttatcttatctacgtatgtatgatgagactcttatgtctgatttgttgtgtaggaaatcacatggcaacaacttgattatcttcggacaacaagtgatgcagatatatgtctaaaatcgtacatggtttgcaccttttgtgttgtgagtaatattttttatatatcatccacatataaattgggcaatttccattatttgtgcataacaatataatttatcaaatagaaatttatcttatttcattgtttctcgaatcttgatactatttatctatagtacggtaagactctaatgttattactgcagcactcggacccagattctgatcttgactttgagctcctgctacttcaccaagatcatgatcttgaactgctgctcacagattctgatcttgaccttgagctgctgctacttcaccaagatcatgatcttgaactgctgctcacggattctgattttgaccttgagctgctgccacttcaccaagatcatgaccttgaactgctgctcccggattctgagtttgactttgaactgctgccacttcaccaaagttatgactttgagctgctgcttccagattctgagtttgaccttgatctgctgtgcttggtgatctttttggtaataaatttttaatgcaaagtattattatataacttttttttatctttttttaacagaaatgttcttttatttttatttttagtttagttgaaattattaaaaataatctataatgcaaaagtactactatataattatttttatttttagtaatgtaaaagtactaatgtatcactttttcatttacatcattttttatattttggtaaaaaaaattatatgtttgatgatagttattaaatattatcatatgaaattttaatgttgtggtttctaaaacttttaaattacaacgaaagtaatattttttatttcaaatatacaatttgaaaaattagaacgtcaatatttaattgaaagtgtttgttagagagagagcttaaccatttagcttaagaaaataagttaattttgtttagaaaatctatctgaagtccattttggctctctcatttatgcattaatcttccaccaatgaaatcaggtttgaaagttgtttttctcttacttctctttatttgagtactttgcgtagaatttggttcatagcttcaaccacaataatctgacttttaggttttgtatcttaagtaattaagaacttgctgtttaattcagtagaaaagacaaaactgaacaacatatgtttcagcaacagcaatacagatctaattaattatataaatgaagtgggaactctatcaaatggagcgtaaagaggagattaagcttaaaatgaacaaaaacaaactgttttatgacaaaattctctctgcctttgttcatttgcctttactagtttatatagacaacaaagaagaaggaaacagcaattaaaatggcagtgctcttcaaactaggaggacaactttctccttattctcataataacaaagactttaataagcaaaaaaaataacacaaagagttgatcactagatgagaattctcattagtgaccactttctctttatgctttccctaaataaatagcaaaatattgattaccttcgtagagaaaaaaagtttatcttctaaaagatttagttttggcatgttaatgattcagttttcaaatgagaaatcagaagaattggatctgacagtttgatgaaaatctaggaagctccataacagcattggtgatcctctggtacttgttattaccattcttatattctctgcgcttcacatcaacacccacattgacagtttcaagacatttcaaattctccaagaaatgcctcatttgtttcagctctttacaagtacctcgataccctgaaatatttagcactttgacttgacatgtagataaacaacattcgtcatcctccgtcgtcttcttctttttcttcctcctcttagagatgcaagcgcaggcgttcccgcacatatctgttacttggtgcacaagactctgaaagcaaaaggaattcaattaaaaacattaaagctaggcaaagaagataatacgtacggcacaagcaaattcatttacaatagtaatctaggaaaagcgaattgtgtggtgttgatcgaacgaaattgatgataccttgatgactaaagtttctaggtttggagatttgttgaggagaagtggcaccacttgccagcctatttcttcgtcactctcaaaagataaagtaaggaggttatgaaacaccggcattgtatcacagcacaagtgaaacacctggatttgtagtcataaccaaaacagacatataatacaaaatgagaccttgctagctagcatacacttcaaattgaaacaatcatagaagaagaataggtagcaaaactgacctcaagagaatcagaagataaatgaagggttttaacattgcttatccctttaagcaaatccgtaacatcaccaaaaatatcctcattctgatctacaagtctctccggatatcggatattgagtctagcttcttcaagggaaaccagatcaaccgcatactgtttcgccacataactagaatagtcaaggtacacaaggctgggtatctgaaagcaacatttgtaagcctcataacgtaactcggaaggattgtcatagatgttcagccgtttgatggaaggactcgatacgagccctttccaagccgggcattgtgtctcattatcataatgtaggaataattcctcaagcacagggcagccagagatgaaattctgatacatcaaagtatctgtaaactccactgaaactagagagagtgatttaagcgctggaaaaaacactctcccaggaggaagacgaccctcagcataaaacccaccgcatattgtgagctcaagaagtgtattgctcgtgaagaactcagtgtctatacgatgcatatgtgcggtctccaagtgaagatccaagaagccgcgatcgaagacagtgcgtatccaactgttcacccgagaagcgtcattgtgaaatgcacaatttagggagaatctcttgacggtggtagaattgcttaagagagcaagtgttctgtccacaaaatcacagaagtattgatgattaccatatgcgtcattcaaatcaaggttgtctacaagctcgagcagattcctccaccttttggacagaactgatgtgcaagcagcacgatttgtgcaaaacaatgataagattttgccaagaatctcatctggtagactgctaatataatctctagaacccatatctactcttttggtagacatatataggttaggattataaagaatctatcaacaacaaaatccgatctagggttagggttacaagttcagatagtttaaatcaaaaggagaaacctagacagtgaaatcaacagaattgaacgaaaacatcaaagaaaaatcctctaaagctaggagcctaggacatgcaagattacttcaagttcaagacgatgtagattgtggtcgaagataaagatgtagacatgtagtagaagtaaacttacgatcggaaaggaaaccaaaggaggaatccgcaagcacgacgagtctgacaggagaatcgaagaagaagcttgatgagcaaggaatttgagagagtggaagagcgagaacgcagctatttataagttgacagtttcctttttttacacggcaaaaccctaaaaaggatccaaatctctcgtcgattttctacggccaactgtttccgtcgaatatccatcattgtcctcaactgcagcttggggttttgctaaatgctaagcttaatatagagtcttgattaatttttctataaaactattgttttttgataatgggtttttaatataaaaagcatgagaccaaagatattacaagcccaccaagatccacttttgctaaactagaaattaaactatgaaactacaatgaacaaaccaaaaaaaaaaaagtactaattcgaataagtgtttgtacattcacgttgttaggataacttcaagcgatatagaatttattacatcaaagcgtgaagtttttatattatattttaagacaatatattttaacgagattattccagaaaatattgccgaatttatcagtaaacgataatgttacgattacgtacgaatgaatgtaaacctcttcaatttcgtgtctatctcgactaaaaaaaaaaagaaataacaatttcgtgtctatctataatatgagttggatagcaattataaaagtaattggtatggttatataaaggcaatggacatctactaatggaaaaatcatgaaaaataaactaattcacacaaaccataccaaacaacatgcaataataattttcccaaattttaacaagaaaaacaaaccacgtaatctacctatttataccttcatcggaaaaatgcgaataatacagcccaacacgaatactatttctagacactaaaacaatcctatctttggaaattacaggtcacagaaacatttgcttccagaagatttttccagttctacaagccatcaccgttttatagtcaagttccttttcgtttttttttttattggtttacaaattaaattttaacagtaataaaacgcactagtggaatatgaacaacacatttgttaaatctctttagaagctttgctgttttttctttcacctttgtcctcaagtaatttcaagttcaacatttcgttaaatcttttttgagtatcaatttggtatcaatttcccaaaaacactccacaagctttgtttttcttctttcccttatttgtcctaaagtaatatcaaaacactaaatagaaaaaaaaatatttaagttgactgcattaaataaaaatcatcaactacttaaataagtatcttattatcaccagaattcaaatacaaattcgattaaaaatagtaaaattactaccaaattatctttcaaggtaaaaaaaaaaaccttctagaagaaaacaaacttagagtaagaacaggacaaaacgaactcaaactcaaactccttttataccctcactcaccaaaaccataacacaaaacaataaggatactatagtcctttcagtagcaaaaaaatcaggggtaatatagtcatttacattaccttcaaatatgcccgggatatatgcacgcttttatatgcagcgtagacacctaaactgaatcagtctaacagagagcccaaaaaataaaattccccttctctgatttttcggagcagaggaaaaaaaaactcaaaatcggagagataagaacaaatctcaaatctgaaaattctcgatttcgatttcgatcttctcgtcgtggttaaacaatggcggcggcttcgaatgggagtgagtatttcgaattcgatgtagaaacaggaagagaatcgttcgcgcggccgtctaacgccgagacagtggagcaagatgaggaagatctacggtgggcggcgatcggaagattaccgtcgcagagacaagggactcataatgcgattctgcgtcggtcgcaaacgcaaacgcagacttctggttacgctgatggaaacgtggttcaaacgattgatgtgaagaaattggatcgtgcggatcgtgagatgttggttcgtcaagctcttgctactagtgatcaagataatttcaagcttctctctgctattaaagaacgtcttgatcggtttgttacgactcttcgaattc

SEQ ID NO: 307 - DNA, 88543 bp, Arabidopsis thaliana
gaattccatgttcataatgggttaatgggtctaaaacgtgatacaatttcgacttagataaatagaaatgaaacggtaggaatcaaaattgaaagggagcaaattgacgtcatatcttttagtattttacatcactactacttcgttacttttcaattttacattataaataaattactttttctgaacaaaataacttgttatatttttttcgaggtattttcacgaacatagcaaaagcctgcatagtggtaatatatacgaacaactaatgaattctcaaacaaaaatccaaacactaaggtttcgaatagagatgtgctgtgataataacgtatatatatacagaaaaatttgttactattggaactgcacagtctgaaccgcatcgtgcggtttggtctccaaatactagattaaaacgtgagatccgcaatacgtggtaaaaaaaaatattacaaagtacggaacctatttttgctttgaattgatatcacttttgttgggcttaaaagttgaaactaattggttgggaaaaggtccatagggcgatggtcaaagctcaaacacagaaagtaaaaaggaacacgtaccagtctaacttcatagagtgggcattgtgtaaccgaaccaagtaaacccaaactgatcacaaatcaaactgaaccactaatccactctgcttagttgagtattgttaattaaaagatgataactcctttaattcgataactactaataaatcctttgatggtttgtattctgtaaaaataaatctaaccgaactaataacatcaagcacaaacatatttgggctcaggctactcagtcataatgggcctttaaacggcccatactaagtcagaacaaagagcaagtaatctcaaaatgtcatcttcttcaaagaaagcaaaagaacaaaaacaaaaaatggaaaaagaataagtttcctttaaatttccccaatatcaaaaatggaagtcttactcaacaacgcacttcttttataaccgtttgacgtgtaagtggtccgcgcactaatctctctctccctctctttcttcttcttccacaaatggcttcttgcgtcaccggaacagaggcagcaatcagagcagcggcatgtagagacggcgaagaagcctctcatctaaagatagtcgccgtcttcgccatctttctcacaagcgttttcggagtttggggaccagttttactcgctaaatactttcatggtaaacctctgtacgataaagcaattcttgtgataaagtgtttcgccgccggcgtgattctctcgacgtctttagtccacgttttaccggaagcgtttgagtcactcgctgattgccaagtgtcgtcacgtcatccatggaaagattttccgtttgctggtttagttacgatgatcggagctataacggctttgttggttgatttaacggcgagtgaacatatgggacacggtggtggtggtggtggtgacggagggatggagtatatgccggtgggtaaggcggttggagggttagaaatgaaagaaggaaagtgtggggctgatttggaaatacaagaaaatagtgaggaggaaattgtgaagatgaaacaaagattagtgtcacaagttcttgaaatagggattatatttcattcggtgataattggagtaacaatgggaatgtcacaaaataagtgtaccattagacctttgattgctgcgctttcttttcatcagatttttgaaggtttgggtcttggtggttgcattgctcaggtttgtttctttcttcatttctttttatttttggtaaactagttctcacaaatttaattagtgttgaattagttaggagagaataataaatactatgagaaaaaactagttggttctgactttagacataataatattttaagaaacctagaagaagtaatagtaatatgtagatgttgacatttttgcatatcatagaatgtgacattctaatttagagcagctcatggaccatatcaaaaccataccaataatccaaaaaaccgaaccaatataacattttgtgagtttcattgatagttttttggtccttaggataaaacttaggattgatgagtggtattgtttgatggtcaggctgggtttaaggcagggacagtggtgtatatgtgcttaatgttcgcggtaacaacgccactcgggattgtactagggatggtgatatttgcagcgaccgggtacgatgatcagaacccgaacgcattgataatggagggtttattgggatcattctcttcaggtattctaatatacatggccttggttgacctaattgcattggatttcttccataacaagatgctgacgacttgcggtgaatcgggttctcgcctcaagaagctttgttttgtggctttggttttaggttctgcctctatgtcactacttgctctttgggcttagacaaaaagaatttaaggttatatactaatttggccacaggaaatagtatgaatacctaaacctgttttaacatatttgaactttggtttactttataaatatatctaattatcatttcttcattttccttcattaactgtaagtatatttacacattaaacttctctgctaaaacaactgaaaatgaagttagagctctcttatatactgtactactactaaaaactgtactgatcttatgctaaagctaagtattactctgtttagacgtaataaaccattccaacttcaagcagagaagtgtgaggaacattaagcacaacatctgttcctctgcaattcgtgctcatgaacgcaaatacaacattcactgctagtttcttcaacaccgacgatgattgcttcgcctttgcgtatgaatgtcccagtatatacgctactccagcttctttcgcttccattatctccatacattcctctttctttctccgaacactcgacatttcttcttcttcaagtcccggttcggtttcaacgaattcgactattgcagatactaaccggctttcgaagtcatacatttctctaggaacatctctgtatccatacctaaccacacttctaaacattccatactcttttggccctactctgcttatcacaaacctctcttcttctccaacataaggaacctgaactgacttcacacatacaaacactagaatcttgtgaaacgcaggcagattcgtcacgaaatgtccgaaaacagctggaactcccgtcacaagattcgaatagaccagtcctattcctggaactctaaccattcctatgcttggtcctagagaaactatccggtccatcgagaccttgttctcaacgtcgaattcatgtttctttgtagttccgtagttccatatgtacattaccgccatgaatgtcaaagagaggagaatcggaatccaacctccttcaggtactttgtagacgcatgacgagaaatagagaagctcgatggaaccgaaaaagacaacgaatgcgagaactgtaatgattctttgcttccagacaattgtcatcactaaagtcatcaaacatgtagtcacaagcatcacagaggtcacagcaagtcctgcagaaacaaagagatttaaacataagttttcaattttctaaaaacaactgaagtgatcatgatcatggtctcaccatatgcatgacccatcatattagtgtctcttaacccgatagtgaccgccaggcaaagacacatcagcatccagttaacttcagggatatagatttgtccatgtattttgcttgaagtgtgaatgatcttgacccgaggaaagcaatcaagtgcacaacattgacttatgatcgaaaacgttgcggatatgacagcttggcttcccaccacagctgcaaatgtagccacaatgaacactggccagaacacaggctctgcaaacagacttatctgacttaatcccattcaaaagtctcgagttattcgcgtactatacagattacagttaagaatttaccgggtatcgccttgtagaagctttgctgaatatcttcatggtgtttagagagaaacgcagcctcacccatgtatgcaagtatcaaacacgggtatacaaagaacgagaaagccacctatatttcagttttgttactaaaagaggattcttttcatcagaatcatatcttataaagttaaaggtcttacctttatggacagagaagagaagtgacctaagtcagcaaacatagtctcaacacctaaggaggagaataaacacaatatataagaataaagaacataaactttgataatgttatataacatatagtttcattaactaaagtttttacctgtgattgaaagaacaacacctccaagtgaaacccacccttcaacaccggtgcttctaaggaacttatacatgtaaacaggcgaaagcgcagagactatacgcgggttccattttatagtgttgtaaactccaatgctactgatggagagaagccaagcagtggagattggagcgaaaatgaaggcgactctatgcgtaccataacgctggactgagaatatcgccaccaagatgatacatgcgatgatgacaacataatctggagttgaggacaagagaaacaaaactaaacatgagacgtgaattagtatatatttgacaaagtaagtaaacagagtcagacatactctcgtgaaggttgggaatcttgagtttgactccagaaacagctgaaagaactgcaagataccaaaatgtttggaaactatactttgtctaaggttcactgcagagaagttctctggaaaatttacctgagattgttggagtgaggacactatcaccaatagccatacatgtccctaaaagaacaaagagcaacaaacacttttgagatttcggatgcttctcaaagaatgatttaaccgctgcgctttgccgagtctctcctgggcttcccgttgcatatgttgatagtttctcatccatttcttgatgatttggtaaaatgcttagcttggcatatctacaaagaagcgagtacaacgcaaatgttccaccttcaaacaaagaacacaaacgactgatcaacgtcgaaaacatacgtagacatatcataattctgatataaaggcttaaagcttttaccttctccattgtcatctgctgagagaacaatgaaaacgtatttaaaaagagcaatgagtgtaaatgtccagaagatgaaagagaacactccaaagatctcttcatcgtcttcatgaagacttagtttcccagagaaagtggtcttataaacatagagtggcgatgtactaagatcaccatagatcactccaagactctggtaagccaaagtaagaacattggcacaagacaaagtcttcaaatgctgaaacattttaaaacaaagattatgaacttttaagatttatgtactcagaaacattgagttttcataaagtatgacctaaatttaacctaattacataatcttagaacctttactctgccaatagatgtcaactacaaaaaccaaacagtctaataaaaaaaagttggacttttcacatccaactcatttctttccttaaaaatagagactttactaaatttcaaaatcaaaccttttgtcaaattaacaataacattaataattagaaggctcaatttcacaagttaacaactaatctaatatcaccaaacatgaaaagcgttcacgtctttgtttaaattccggtaaataccaaagtcgatatggttcaagcaggaggacctaccaatcctacttgggaaaacaatccaaaaatgaagcaaaaacagagcaaaaatagaacccttaatcttccacttgttcttcttcttcaaatacgaaaatccaatctcgaccacataaattcgcattgttcccaaaatcaaaaacccagaagaaaaaagtgatttttgagaaaattctcattgcaacagacagaacagagttgaaacagaacatgataaaacagaggatttggttactatgagaaacacagaagaaaaaaaaactgacctgttgagaaataccctgttcgataagagatggtgattggttcatggccgtgtattcaaaactctgcaatatttcagtttagtttctgagagagagagagagagagagattggattggattggaagaaacagagagaatataataatgtgaagagagaggagagaagttgggaagtaggaggagaagaagaaagagcgaagtgaggaaagagaggaagagagtggtgatgtgttttttggtgcaaagacgaaactttgcaggttttcatttattgctttgttctttctccttttttagtttttttccgatttcaagtttactttatacctttttattatattatttccttatttaattaaaaattatttttcgttgacaaacacttttatatttttgttattttttgaaatagtcttgtaagaatattttattaaaatgttcgacagaaacaaatatatgttttacagtggttaattttagcatgtttgcttacgatatttgttgcgttgattaaataagataatgttttgagagtttatttttgaataataataattaaacagcaaaagaaacctaacaaaaaaaggtgataatatataattgtatagttttgtatagttgaatagtaatttatcttcgatataatgggtactattagtctattgctacatcatctacctttgtaacaagacaactaatgatgggctgtaatatttgttatttagaactatttaatcttttttgttttgtttttgatgggtaaatttaccactatttaaacatgattagcactatttaatcgtgatagttatccacaaacactggcctatttaatgcaaaattacatatatatagcatagatagaggtctattattataatatatgtctaactttgttgcattggttcagtggttctacttaggccaactccaatgggactctaaaacaccattttagtgtaatttttgcactaaaagctttccaatggaactctaaaattcacaccattttagtgtaatgctacagtgttacatcaaatttggtgtgatactattcataactctaaacactattcacttattatatcaataaaaattcaattaataaatataaaattacaaatgattaatagatataaaatataaaaatgaatggatacattaatatattatatctcttgaaatagtttatttaattatgatatttttatattattatgtatgaaaatacttaaaataattacaattttatgtatttttaaatatatattttaatatactatgtttataatgttatgtaatcctatactaataataaatactaatcaaaactattaaataacaaaaaaaatcttttaaataaattatataataatagattctttttttagtgtgatttttggtgttatggttggatagaacagaagttttagtgctaaaaatggtgtaatttgaacaccaaaatagtgtttagccttggagattcctttagtcgacataaatatatcgtaatggtgaaaaatagtatgcaggatatgttgattggtaaaagtgagcttagttaaatgatgaaattttttttcaagtttgttcaagtgaagaagcaaacctacgtttttaaattgtgattctagaattgggtaagaaacaaatgtcagtccatacttatacgaaagactaactattacaccagttattattatgttaaatagagataagttcataaaaactagagttacttttaggtttctattaattttaaaattcaaaacaaataagatatagtaatgaatatgtcagttagtttggctcatcatggtttccgtttttgtttggagtcaatttaaggtgaaagaaagaaaaaaaattatttgtgagatttcattaaaattaaaaccttattctgataaaggggttaagtaaggtttaaattacaaggttcacttcctttatttgttaggttttattttggtgatgattagtttgaatataaagaaatgaaaacaaaatggtttatgtatttttttgtgtggttgttcggttgtcttaatatgatttcactttgacttaaaatattttacattgaacttgacactatagatttattatgacaaaaaaaatcatgtttcactataatcttaattaataaaagatatttgaacccaattttagttaattatatatttaacttcttatacgagaataatatccacctgaatagtcaaatattcaaatagatgggaaaaaagaaagcgatagaatgagactttggtccaactctttctatgtttagagataacttatctatcactacactgccattctttaatcaaactaatagtttatcatcaaagtattgatatttgcataatcacatgcgaaaattagtgtagattatgtttagagctcctatatctaagcagttattaaggatataaatgttcaaatatttacgtttcttcatattataaattagaatatgttaattcagacgttagctaaaaaattagaatatctgaaaatgttaaattggtattgatgttgtggagtgtagctttatgagctactttaccatttgcttttaccgtaatggcatcgatgcctcgagatacaaccatttggtgcagcaattcttgggaccattatgataagaaccaaacaaatgaatatatatttttctttctatgaaatttcactgaagttacaattaattaaatatctttatcaatacttaaatggcaataattcttatctttagggttcctcatccaactgacaataatgactgttcaaattaaataattttatttaaatgtgtatagacaagtgaagatattatcggcaactatttttttgataacgagaatttgataatcaggggatggttaaataaaagcgtaatcttgcttttcttctaacatttttctcaccaaaatttaacacgcatacatataaagtgtgtgaattgtttagtaagaaactctcacgataagttcatgtgaaatcagaaagcagacctaactctgtcttaactctcacaaatgtagcttgtttttcaaaggttaaaagccttaaacgtgtggttaaacatgtattaacaaccaatttgaatgatgaacctaattaagccacgtccatcttttattaggtcaatatttattacctcttaatttcagttatccttaacttttgtttcaagaacaatcatcagaaagcaaaacaaatttgagtttttctctcattcgaagaatattataagtcagagttttgactgataattagcatgtctcttactacgtgatgtattttattatatacagaaaagtcgtggaaacatatggtcagacagattttacctcgacaataattttttttataacgtgacgtaatgtcaaactagtagaaaaagttacgatatgtgtttgtgtgttataaaacgatgtttcttttattggattatgaatactcttatgaatcgtgttgttaaattatgcaattaaacttttaataatccgggaaaaaagtagaaaagtatttatctatcaaatgattaagttgttgttagataacgaaacccgcgcgaaggaaaacttgctaaaaacatatgttttcacgctgcataaatgtgatattgtttaaacaaaaattacgaatgtgtcatgtatgtaaaaatttgagctgttacttatatatttcaattgctaactaaacattgttttatttgtttacttatgcatgacatccgacagtacttaactcgctcatctttttggtttaaaaattgttgtttacattttacacatccaaaacttcattctgttcaaaatattcttacatttatgtttatttccgtttaacctttgtacataggaaatgagactcgcggttacttcttccgtttatttaagggaggagaaaagtgggaggcccatttggggatccaccaaactcgtcgactagttctctcaagttgggagggtcccttcctcattaaatgaatttgccattttctcatttatcactcgttctcttcatttctaattattttctccatattattttgaatatatctatcaattgtcttatttgttgtgattagtaacctgtatattaatatatggtttggtccatctctgattttgataggtactgaatttgatgtcgagacgtcgacaattttgaaataatttgaaatataattcaatctttagttttgttttgataagactcatataaatttttaatatggtagagcatggccaatactactagaattatatatagccggagagtgttaaatatatttatgaatctagcccatagatattaatgaaactaatcatcttgtctttataaaaaacaaactaatcaacatctgctgaagctagatttattagaaataaaatatattagatacttttcggtattactatagcaatataatctatgaaaatgttagatctctctacctttagagagatatgaatcacttcttcctctcaaaaattgggtataaagagagtagaaacttttgcatcaacacaagattaaacccgaggataagaatttgcaccataccatataaccgatcccttttcgtctctcagtaacccacatgattttggagagagtgaatagtatgtaatagtcgtagttttatcaagatgataaaatgtatatgtgatcgattcctttgttgagtttagacttagctactgtattattgacatcgtgagagagagtaagcgcatagaagtaattcggtggtttttgtcatgcatgtaggtgtaaaatgtttgcgaatgattcatgggaaatcaaagtgtacattatgctactgtcgtattctcgcatagctggtacaaacaaacgtcaataattcagatttcacatcaaagaaacgtaaggacatatgcatgcacacggttgggaataatttatgaccatgtaagtattataatatcagacactcgtcactcaaaaagcctcaacaaccaaatcttttgagtgtcttgtcatcttgtagggtccatccgtaccatcttatttatatatatctcaaagtacattgcatgtaaaagtggatcggaataatacaaccgaaaaacaaacaaaagggttttggaaaataggaacaaatgggcaagaaattggaaagaaaaaacacgagaaaaagtaagatagcgtgagaaaaaaggaatatgaaattattaaatttgctaaagtaaagtagacaggaaagaaaaagcagcaacgcgtccctttgattgataagtgttgaaagttgtgtatgatgttttttggtttaaaaagttgtggatgatgtttcgatgaagtttctaggttttataccttaactaatttaatgcacatgcatggatgatggacttgtaaacttcattaggaaggttctttgaactctttaacaattagatttgagattaatacaaaacgttttgacaaataaggtgactagctctattggtttcttttagaggtaaatatccaactattgtttcttgtcattgataaatcgaggtaattattatacatttggaattgaatacaaatatcgtccaaagattttatgttgtacctagccatatcagtttatgttctaaccaaatcaagctttttaaaataaaagaaaaaaagacagatgaaagatgggtttgactgttggttaagcctccatctgatcgcaacgtttttttttttcttcttttttgatcgcaacgtttattagggattcattttcacttgatgaattaatatcacttttcatgtatcaagtgattttgtgagtgttatatgatatatcaaccagatatttgatatatgatatttaatttcctaatgttaaagggatatatgtcctacaagtgacaaatcagcatcatgaattaatgggttcttaatttcgggatccagtttttgtgaaagtccatgaaaaccaggtaggtccggtcaactatgtgacacatgacccaacctgaatcgtaatttgtccatttgtaatacaacgaataatgaaagaccaccagagagagagagacttgattaaaaataacatacagagggatctcatctgcatagtcttatccaaatttatagactgaagaacataaaaattgaactgcaaaaatggtcgcttagttaattccaactttacccattttatagccaattagctacggatatctagaattatgagtaaccacttttcagtgattcaataacacgactggcattaaaaagagaacacgcgaatcatccatgcatacaaatttttgtgaactcaaaataaaatcttctcttgagtccacactttttccaaaaaaaaatcataagagagctcaaaatacactctttttttcttccagataatgaaacccaaacaagcacgaaaatcaatctcgcaatatgcaaaatgtcacctgtgacacttttgtgacactaaacatatagactctcaacacgactcaaaacatgtattcaatttgaaaataaaagccaagtcttccttcgatggatttaaaacacatcaggctattgattacctggccgtatgtgtgtgtaagcatgcatcttaagctgagggaacagactcctctgttttcttttcttcaacagcttcactctttttgttttcctctgccttctccactggtttcttctcactttccttctcttccactgttaacttctcaagaagaccagcggtatcagaggcatctttgctctcttctttctcttcttcagattcagctacttccttgaacttttgcataaatgctttgcaatctgatcatgtaaacaagacttgattattatgcaactctactatgactttgaacatcttatcaacagaagggtgtcataaacacacacaaaacgctttccaatactacacacagctcagatccaagctacattgaggcaaccattattacacttaactgtttttgtctatgcagatcatatacatgaagctatatagttaacttctctagcttgattgccacctttgataggtttttatcatcaagtaactaccatgatactcttcaactttcagattagcgaagaggtgcatatgaaatctaccagagaaactaaaccaaatctctaaattggccaaagacactacatcgaaaacttccaaaacatgctgttaaacagcaatatcactaagttcaagatcctccaatgatctaagccataaattaacagtgtctacgctcgagactgctgattaagaagcacaattatgccaaaacagtatgcagaaagaggtaatgataacgtcgaagctactataacataggcacaatgaccgtaatcacacaaaaacgagacagagcagtgctactataagcaacaattacgtagtaagatccaatcaactgagaaataaaaaaacacaaaagcaaaattcacactcactctcaactgaagcaaaccggatacagaagagctcatccttcaattcaccatcggagaaatcacgagcgtgccatacacaagacttatcattcccagcgtgttcctgaacactcatacccgatccaactgcataaaattccaaaggaaacgatcaaaatgagtaaaaagagactactagaaatacagatccagtatcattttacataaaggtagacaaatcttaccaagatgattagcacagatcttcaaagttttcgattgcctcataacgagacgaatcttcccagaaactctatgtttcaaaaacttaacagtaccagcacctctctccttccactgacttccatctttatcaaatcgatacaacttcgatttcctacagattttcgcacaacaacaatcaagctccgaatcgaaactaaaatcctagaacttgaggaactactacggaaaacgatcagatccagtgcaattagattaaacgaagggagatacatacagatcgaggatggtgtcttcgtcttcttcaccggtggtgacggcgacttcttcaagcctgacgataggagcaacctgagcaccggtgtcttcatcttcgttggctccagtctcttcttcgtctctgttctcacgctcgggctcgttgctaatgctcgccatagtgtcaaatcaagcttttgctctgagttggtttcagttgttgaatttgtgtagtgtgtaagagagattgatggagagaattttgggagtgatttgtagaaaagcaaatgagatttttatacgagacgccgaaagagagacggtctatagagaagaactaaatgggtctaagacaaggcctataggccacatataccctataaacttataatgggcccttttgggcctatttatatatctgcttctttttttgtagaaccaattggttcaaaatacagacaacacgtatctaattttatggaagaaggtcaaaactcaaaattccttcaaattaaactctttaccatatagaaaaaagaaaatcaaatgaagagacaaactatatatcatgaagatcttggtttttagaattttaaaatggtgtctatgaaaagaataagaaaaaaaataatccaaaagtctttaagaaaaccaattcaacattccctgaaaaagaccaccaaaccggactaagaaaagagtaaagaaaaaatgtttgattcagttccttaaaggaagagcagagagatagcaaagcatcaaaaacctaaggctcaacagcagtaacttgttcccactctccatcaacagcctctttccacacagtcacgttgttgttcccatcggatacggccaataagttaccggtcaacgaccacgagacccgccacacaggagtcataaagtccttgagaaccttaccttcccattgctcaccttcttttcccactgtccatatgataactttcccatcttgggaaccactggctatggtggacttggggagacccaagtttggtgcccaagccacatcacggacccaatcagtgtgcttttgaagagctggaaagcaatccatcttccatgacccgttagcgagcttccacactttcacggtattatcacatccaccagaagctagcttgtaaaccggatcgagaagaccagagctcacaagagcaccaggcgctgtggctggggcccatgagactgaagtgactccaaccggatgtgcttggtcaatccttgatgtgtcccagccaccgtcagcacgggctgtgaaaaccgaaatgttgccatcagatgacccgcaggccaaggatagtccgatatcatgaggagcccatgcaatggagttgactgaagatttgtggtctgtgaaaacatgatcttgggtccattggttctggttgccttctttccagagtatgacttgaccatcataggagcatgaagcaaggattgatccatactttgggtgtgcccacgcgacttcccagacaggaccacggtggccggttaatgtggctagttgctgcgatccaccgttgttgctgacaccggttatcttgatggtgcagtcagatgatgcagttgcaattcgctttccatagtaatccatctgcacatcatggacaatgtcctcatgacccgtttcaatcttctgacctggcatgtttccgaaatgattgtccctgcaaatagaagtaaaattgcaaaattgttgaatgagatcatctgtgtggaacaacacacacagcaaaatagcctgtaaaacacagctcatggaagaaaagcagagatcataaactacaaggttcacaaatatctcacagctaatagttgaaacaatgtaaaggctcatatgctatctgtcacaacaacttcgatactcatacatcacatgtaagtacaagatacaacacagcagaagcaagatcaattataacactttcaaaacaatcgcatctgccacagaaaaactcaactaagtgattctccgccagttccaacaggaaactatataaacaataagacataagctacggtatgcaagttgaaaaggaacacaggaaacgaatttgatgatcaatagtgggtaattcacatctcttccaatggatttcaatcttagggaagtataataacatctttcttattttcacttcgcttgctcaagcaatgagcaacatatctcaccagacacatgtatcaacaaagatttagtcgaaatagatcaccatgaaacagtcaattctcagagatcaatataaacctcaagcaacaatcaccagtagtatagatttcaagatcgaaattcgaatcgatgcagatcctaaaggcataaattatctaatcaaaccgattcaaacacaaaaatcgaagctacggttacgaatccgaagcgaaatgtacataaagtagacaattgtataacgcgattcaaaaatcgagaggaaactatggaaacgcgattcaattatacggttcaagaggtcggaatcacaacacaaaacagatcaaacgaaggaagctatcgatcaattactctgcgagaaccctagcttacatttgtcgataaagctaacaaaaagagaaaggaggaagatcgaactgcgcataaaatatcagggaagagataacaaacctgaaagaacgaaggatcgagtgagagacgatgcaatgtgagccgaagaagaagaatatcgccggagaaggaaacgctaagggggatcggaagttttttgtatttgctggttaaaataaaattagatctgggtcaaagttatataaaccggagttcgtatactaaaccgggtgggtcaaattgaaaaccggagggagatgagtgatctataagttctgaacttcagatccatcaatgggccatggctactgcaagtgatctataagttcagatccatcatgggccataaatactgcaatatgcgctttatgggcctactattctttttctcaaccagtatgtgtttttatttagaaaatggattaggtactaatcaaccaatactcacactgtttaaactttaatgcacttatggaaaaagttatacaattccgtttttgcatttttctaccaaatcttaaaactcaaagaaaaccatttgcaggaggctccttgtaataattctcttacatcaattataagtaatacaaatattcaaaacaagtgatataaaatgatttttttgtagtattggttctctataatctttattagttagatgatctccttcaactacgtaaactaaaagtacgtagatgatctctaaatttacatgtttttttcaatatatggataagatgcctatagaaaaaaatcataaaataggaaaaaagttgctcgaccgcaatagctatatatctaggcattcgctaagttagccaaatattaaataaaatctgtaaaaagtattgaactttcttaaaatcataaagtacgtaattaagtgacgacaataaagatgagtgttacataaatcgtaagaatatacatatagaatagtacaattatatatccgttataaaaagtattgctaataaaaataaggttttgaagaagagataagcgatgaagagatggaatgttcttctttataatctaagcgtatattgtatttagattgatacttttttccaaattgaaaaacttatggagttctagtaagccaactcaacgttgcccaccacttcatcgtcatcttccattttctcttccttactaccatatttattgtctgaccttttaaaacattgaacaaagttttatagttcacatcgactatttgacctaacaatattatccaacgccgacaaaaaaaaataagaagaggctgacaacttcacgttgacactaaccatatactttatcagcctaactatacttaattacatggtcttagttcctctctaacgaacttaaatattttactctataatgtatggtccaataagaagctatcaaaccaaaaactgggtgtgttaaatgagagttatcaacaaaaaaggaggtaacaattgagagttaaggacactcacgtaaaagagtttttatgttaatagatagaccgatccgaatcacatgcaataccaaacaaaaagttaaggctgagaatgaaagatgtagatttcgaaaaattattcttcttattattgttttgataatgataataacaacaacaactacaacaatatagaatatgcataataatactactggtgtaaaacgtggcatatatttgaatattctctaccaccaatatcatcaccaacaatattgcttcacacgtcactgccgacgccaactccgtcgccgactcttcattcctcggttgtcttacggaatcatcgcttgacgactccaatgatatgtaagattccaattctacccttggagaaacaagaacttccttttttgcctctgactcttcggaagtgtctctaacctcagtccaaccattagattcccaatttgctcctccggttatagctaatttacttatccttgccatcgccgaaaccatggattctggtctccattcgtcgctctcttcttcttcgtcaaactccgagttgacccagtcaagaacacaacgcggagacgactcagtgaagaacgagtcatgatgatcttgacacagaaacggatgctgcaagagctgatcacagctccaacgctgactccgatcacgtttcaagcatttctctaagaaatctctcccgagttccgataaccccaccggaataaaaggcaaatcgttagagaacccgatccgactcagcgagtcgaaaccgtgatcttcccaagctggttttccggtgagcatctcgatgacggtacaccctaaagaccacacgtcactctccggtccttggtactctcttctaaccacctccggagccatccaaagcggacttccacgtggcgaaacatgaatcgtagatttctcaaactcaaccgccgatccaaaatccgctagcttaacggagctaccaccgttaaaaacaagaacgttcttagatttaacgtcgcagtgaacaattccgttagaatgaacgtgactcaaagcagagacaagacaccacacgtaacgcctgagaagcgtttcgttaacgattccaccgttagcaacgtcaccttccggtgaatactctaaatgaagatttcgaaacgacgccgttccttctttagacacatcatcaccgagaaacctcactatgtttggatgagacttcatcgaccgtagaataacgatttcgttctctaacgactctgcttgagaaggaagacacgtggcgagatctatcgacttcacggcgaaaagtccaccgtcgattttactcaaagctttgcttactgtaccaaaacaacctcttccaacacaagaaccacgaatccaagaagacgaagaagaagaagtgtttgagataatgttctgtttctccatgttttttttttgttgctgcttaactaacttttcgtgtgtaaatttctaaggacacacgacgatatttatacgtgtgatgaagtgtcaaatgtgaacgagaaataaagttggaattttaattttattatccgacgtggacgtttcttttctacttgtctttctggattttgaaatcgtgaagccataaataaagacttcccacttggggaaattcaaaacagtactaactctttaattaaattagcttttaacctttttaattagacaaatggatagttaggaagaaaggttttgataccttgatgatgtcagtaacgacacttggagaagttcttgggatgttgtaagaaagaaaacttgagtactttaacttttatccttatcaacaaagagttcaagttgtggtttgatcaggtctcgttgattctttacccgaaaaaaggataaaatggaataagtcaacggtttaataaattggttcgtttaacttcaacaaagaaaacggtttgtgttttaattttactgttaaaaggacattaagttaggaccgacaagtgctgagagatctgcccgacgagtcgtgggaacggtaaactaacaaaacgtgtcgattgattttcggaccctttgtttggtcggttgacttttgttgttgttgttgttgttgttgcgcgttttagtttttctttttctttgttgactcgtgttataggaaatcagagacatggaatattcggttgtaatctacgaatgatgtattattattcttgtaatcgtgataacaaattacgtagtagccaatcatatgaagagaattgttttatcttaattaagacgaatcaattatcactttttgttgtcaattttggactacgttcaaagaataaaatttaatccaatcaatcactcttctaaactttgtgatctcataattgtaaacattattttcttttatatatctcaaaacattaccaaaacgaacatgtctaagttgaggcactcgtacagtctctaaatacatacatgtctgttacaccagaaaatagtcctaaccctaaactacaaaagtttgagtttgcggtctgttaccgatagatttatagaatgtctatgtacaatagtggtagagatctcgagttgttaaatgcgaggagatggagtccttttcccgtttttaatttaaaagttcttaacaacattttaataattaatgaccttaaatttcttttcttttttggctttctttctacaaatttccaaggcctacactagtgttctgtcaaaaggtgttgaaaacatgttggttagaacttagaaggtctatcggatgaaatcgaaacaaatattagatgctctagtaatatgcattggatcaatttcctccaactaacttttagtgcttaaaaagtgtcaacaattgatgtcgacgagggtgcatcggtgtttgtacacgaagcacggggaagacctttaaaaataagcgaaccaaacaaatattggaagcgagtaagtaacgtgtagcgaccgagttagttgttcaaagaggttgagagagaggtatatcacttgggcacctaaagaactagagatctttggaggggtctactttggaagcttatgtgtcactagcttgttggtccacgttctccaacagagaaccaaagactccagttgtccgaactcactaatgttttgctagaagatcgcactattgacgtgcactcaccacctccacctctacttttaaatattattgtttttcttgtcttttgttgggtaataaaacagataatttactcaacgtgatccttgaggatatgaaaaaaaatgtagttttcatttgaaatgcttataattccacaataatgttgaccaacaaaaaagttcatgaataatcattttcaaatactaaattcatgagttgacaaaacactagttagtaattaattaatttattaaaattattaaatactttttcctgcttcgatacacttgccatctaattacctatggtatttacttaataaaaaatacgtcgctttatgaaaaaaatccgccgcagcttatcgcatataaagatagatatatatttatgttacgaaaaattattttatttgtttgcttctgggaagatctctgcccttccgtgaacgtgaagtactatattaacggtccaccacttgtatggatatcctttagattagaatccaaaaaataagatattattttaaagattttaaaggacccataccatattaccaagttacagatcgaaacaatccacttggaaaacatattagacattgcaagtgcaacatgtcattcattggtactaaactttaatgttcttttctaatcgaatttgactctatatatgtatgacatgttgtaagtatatacttactcggaaagagagaaaaatctatagaaatcaaagtgaaaggtaatcaagaaactgtttgacattaaggcgcgtggttttaaagactaaaaaaaatgttatgaataatgaaaagagagacatttgattaagattatgttgatttgctttaaaataatatttttggggtactaaggatcaaaacatagtagagacataagttgctgtttatgttgataagtgtcgtgagagaagaagacaacgacgaagcagaaaaaactcgaaattaaggtggccgacaatacaacatgcttatgttattgcaactccgaagaacctctaacaacatcatcatctttagcttttcttttataggattgattcaagatcatgcacacttgatcttcgtatcaccaagatagagatccgaatggtagtaaaagtggcagcaatacaaatcgagcaatatctggatgtccgaacttcgaagcattgcaagcatagttgaggcagcatgggttgtcactatgttatgtaaacggtttttcccgactagttccggaccgcatgagattataggtcaagggtccaaaaatattttgttgacaaaaaaaagttatgtgaattgtattacagtttaaatgttaaaacaaatatatactttaaccaaacttttatcacgtcacatgttaatatttaatttgaaaattttcgtcgtcttaattttttttttgtgtgtgtgtttttttttatagaaaaagttgtaagcaaattgtttagttttgatagattttaattttttccaaaaccctcagaaaaaattacgctctcatttaatacttgtactgcataattttggtgaggttgttactcgacttgtagttgtaggagagttaaagaatcttaagtatttgaaagactgacagatataatttttttggaatacaccatattaaatagagcaatacatgaaaacatagcgattgtcaaccatgaaaaacgtcagaaattcgttggaaacaagcttttgttccaaattcattagtatcatgattagtctgttaacagttttgcactttccttggtgtagctctctcgctgataaccaaattgtggattgcatcgatcatcttgccgagataagctcggtctcacattgagataagtgaatcctttacatgtgttcctccgaatccgtttagctttctttttcattctaaatcgaatcgagtaacaaaatgagaggtgtcaaaatttcgatccaaggttcttccgcatatatcattacaacaatctaacttgaataccatagtttaagcaattaaagtcaaatacatgtggtgctttatattatcggttatattttcttcttgcactaaattttcaaatcgtcgattagagctgaagacataatgataaggccaatgcttcgaatcaaataatgcgagtgaattgtttgcacgtatctacgattcgcttccatttcatggactatttttttgtgtgtctaacattaatttacgaattacatcgcgaaacaaattgctacaaacaaagtaaatggctttaactatagattcttattttgacaaaaaaaaaaaaaaaactatagtgtattaaataaaaaaaacgagggaccacacgcaaaacaccgattctaactttgaaagaatagtaaatgccaaccaatggccagttgtagtggacgaactctgtcttaattacatcgtgaatatttaattgcatgcgagtgtggtttatagtattattgatattttctttgtttatttagttaattattatgggtttgttaacaagtctaattcaactacttcttttcaagctttattcctcttggaaaaaaaaactgcccaaaagataaaatagaaattgacttgtaaaataacataaaatagacattgacttgtaatgagatgaaaatagagttaaaaatcatgattttcacaattaaaatatgaaaagatacaggtaaagttaggttgtagggattaactcaatgtggatcatgtaggtcatggtgttatttgttaggctttcattcataaatttgtttttgaaaaaaaaaacagtgaaataaatgaaactgatagatggaagctaaattaagtgaactaacacaacttatgttacattaagtttagttacactgaatcggtagaacacatgatgtgtgtgggactgaaatgctaattttccggagatttggtttggtaaagttaaatacgagaagaaaagaaattagagttggagaaacaaaaacaagaacaaaagagaaaaagccgaacaacgtgccgtttttggggtccattggaagacaaaaaacaacaacgtgttctccgcctacaacacaaaaacatgtgtttgtaattcacgtgttgtttttacgttctttctttgaccattgtcttcttcctcttttcacaaactcaatcttttgttttatttttcttatccttttatcggcttatccatgtcggtaatcattatcaccgcacatatttgtttttgcttgtttcttatatgtacataaaatgtatatgttcaatttaatttgcacatcatttcactcttgttaatatgtaattcatcgaaaattatggttcttaatccatgtcaacattgtcacaattaacaacattgttaggatatatatgtcaaccacagccaaaattctaagtggtttgtattggtctcaatgtctaaccagactgaatgtgaaaaacacgaaaatgaatagatttaacgagattttaactagtagacaaaataaaaacatatcttacgtttgcatgaaaacagattgagaatttgagatccaagaccaaaactaattaaactacacatgtgaacaaataatatattttgggctattcgggtttgtgtccggcccaatggtttatgttagcctgtcaaacttgaggactttgtttgtttttctcctttttcctaagaaaactctctttatggttgaacttgttttctcgatcaacttctcttgtaccttcgttccactttaaaacaatattggccgtgtgactctttgaccaggatcacttgtcatgtcgatttctttcacgttgcatctcaatatgaacttcatgtatgttggagttgtgaattgaaattcatcaaaacaaggaatctttgattcagattgagtcaatctcttccaagcactgtgttggtattgtactgtagagaaatttgcaggatcttgaaacatatgacaagatatataacgaaccgattattagattaatttcggccaatgctcgaatcatacaagtaatcataagccacaatgagtttagctttgttcactaagttagaaagaataaataaatgaatggatcaagttaaacaaaagaactaaatcatataaaacctccaaatttctaacgtttatcatatatctaaaatcttctaagatgcctctcttttctatatgaactggcgtaaagggatcaacatcacactgatatcatcagacgagcctcgtgaagcagataaatcgacaagcttcttacaggcagctaacaacaatggcttctcggttcctaagcagagaggacgagcaatgtctactgcttcttggttactcactttatcccataaaccatcagatgccaagatcaaaaactcatggtcatgctcgattctcgaaatctttgtctctggttcagctataacccatttcttaagttgagcatctccaattcctcttgacacagctaaagatccctggattctccaaacaccgtgaaacgtatcaacatatcctcccgtggtttcaattcttttccgttcatcgtctctagacgggcggtgatcagaagataaagccttagctacacctcctacactcataacagcacgacagtcaccggcgttagacacaacaaggttcccttcgttaaccagagccgtgacacagcatgaaccacccttaacgtcttcctccttaagaaacgacgcgtctgttgccaagtaaccatgtttcaccgcttcagctatctcagactcgtctctcttaccaactacttcttctacaatgttcttatctaagttcttagctgcaaactcagccgctttaactcctccatgaccatcatagactccgaaaatcgcctgagaaattatcacaaagcaaaacaacgtttagaatacacgattcatcaataagcacacaattgtttcatatgattctgtaaaacttctaattctattcagaatttcaattttccccaaagaaccctaattttagatagcttattaacccaatcaatgtagatctcacatgataaaccctaatttgagctgtaattgctaatcaatcgaatcaaaatcaccaattcaattcaattctaaaccaaaactgaaaaatgaatttgaaatttaaaattacctgtttacgatctccatgaagattggtgatagcagagaaacgatcctccatagcttctcttcttcctctcttacaataaacagaataaccatcaccttctctctcaacctctctacactcctctctcggcgtcgcagccacagcggccgatgaagaaatcggagctacaaatccagcaacaccaatcggtatatcaagccttgtaggtcgtttcctctttaaaacacctcccggaggagaggatgcagaaacagattcagatccaaaagataatggaccaggagcgaatccggacggaggtttctggaaacggagacgaaatggagatttaggagaagaaacggtggtggatggagaggaaggagaagaggtctgaggtttgcgatgagaaagcgttagagaaagagattcttgcggtgacgagagaatcgaagatttgttgcagaatagagaagacgacggtgaaaacaccggagaattacatacggcgacggagcaagacatcgtttctatattttgatttcgatttcgatgagtagagatttgtttttgctgagattattgtttttgtttcttctccttctgttttttttttgttgtgacgatgtacagagagagaagaagaaggtttttaaatataaaggaaagaagaaggtaatgaatattgaatgaattagagtccgtgtttatcgagctttattcaaagtttttcagtctctttgactttgtaaataacatttatgcccttacaactttcatttcctttatttatgttgtccttttactttctacaaaatggatattattttgaggaaaacaaaattagcttgaatcctactcttgttgaccagtttttttttgttggcaaaataaaggaaaatatcattttttcttaataatgaaaaatgtatatatccatgagattttttattccaatattttttcataaccaaaataagaatcattcaatttttggtaactttatgtcaatttaataataaaaacaaattatgtctagtagactagaactatcataaacaaaaagaggagtattgcaaataagaagaaaggccctttgtaacgtagaataaaattcaataaaacacagcagatagtacaaaagagaatgttggagggtaaaacggtcattcacagtctaaaatagctaaaacgatgaagtaagcgatttattgggtttgctctgtgaggttaaaacagacatttcaaatgaagtcaaaaacacgtctaaaaggaaacgaatgctaataattgggcatgtgggtaacgtatctgtgttaaagaagtgtttcattgatgactcactttttttttcttctcctttttaaattaaatgaaaaatagaatcttaaagaatttaaaacgaccgttaggttctatacgtcgtcgttttcattggatgagtatttttgcttgtcgtagtcgcagcttctaagcaagtgaccgttgagagcctgaagaggagccttcgttttgtttgtttccatttgatgaccgttgtgaatttgtcaaaaagtctaatacataaagttgtaattgatctcgtttcacacgaggtcttcttattattaaaatacaagtcttcttcttattaagagagtgttaattttttgagtaatttgtgacatcattaactgatagttttgtcttttaaacggtatttgatattctagagttgaaaaggaattgcaatgttctagagttgaagaaaaatccattagaaagtttttgttaatgttgtgaattgtgatagggatgaatagtaaacaaagaaaaatcagtttttgcaatattataagaccaaaatttccttattaataagtatttgcatatgataagaccaaaaattttacgtcttattatattgtcatgcgattaatgttccactattaagcacttttagagaatgtttttccgtttgaggcagtttataggaaatagacactttttctattaattctttttttttaaagacttttttaccctcaattcaatatttatgtttttaattcttaatttctcttttttgttattcctcttccacgatccttacccaaaataaataaaatctctctctctctctctccatgatttgtagcgcctctctctctctctctccacgtctccataacttttggagaagtttcttaaacaatttgatctcgattatctcaggaatttggtaaaagttctatgtccataaggtattggaggtggggtctctgcaaattgtaagaaaaatcaacaaacaattttttggtgtccataataacgagtccatttaaatatatccattcagaaaaccttttactgattcatattcattctatataccatgtccatataacaggagattcgattaaccgtggtttgtaaagaaaccaaagttccatgtccataaggtcttggaagtggaggtctcttcaaactgaaagaaaaatcaacaaacaatgttttggtgtccataataacgaatccatttaaatatatccattcaaaaacctttctacttatctatattcattctatataccatgtcaataataacaggagattcgattaaccgtgttttgtaaagaaaccaaagttccatgtccataaggttttgaaggtagaggtctctgcaaaccgaaagaaaaatcaacaaacaatggtttggtgtccataataacgagtccatttaaatatatccattcggaaacctttttactgttctatatccattttgtatatcatgtccataataacaggaaattcgattaaccggaatctcgatgctacatagatgaaacgagtttgacacatgagagagagcaaaaatcaaatcaagccgccattgttgaagaagaagatgtttcttagataattgaatctcaaatttatatcaaaacaaatatttaaattgcaaaataaattacaatcttaaagaaaccaagacctcatattctctaattagtccagagaaaaaagaaagccatcgcgtagagtggatttggagattaattgcagatttggaattgaagatattctgggaaatgtttttttcttcgataaagtgagaaaaaaaaaaaatagagaagagatgggaaaaggagagagaagaaatgaccgatggaaaaaatgtagttaaagggtaaataagtaaaataatttatctaaagtgacttctccatttaaagtgcctaattaggaacaaacttttaaaaaagtgtctaatcacgtaatattctctactactaattcataccaaaaaaaaatgtttgctttttatcctagtacataagttatttaaatattttcgaattatctgattaaatgacctcaaaaaccgaaaagaaagaaaaaaaactaatttagaaatatagtgtaatttttctctttcaccactaaaacaaaatcttatttgttcactgtacacttaaatactttttgcgtcttctctttaagaatacatttttaaaaaagtattgaaatgtgattttcatttttgtagagaataatcataggcatatatatatctctatatacataaactccgttagaaacaagcgagaccaaaataaaactattactttcgacatgtgatggcatttccgtgggttaggcaatatactttagaaattgcaatcataaataacttacaattagaaaatcattacaattatcagtcaatcagtcatagtaatgattattagttatgatttaatgctgtttatgttcaacagaagactaagtcacatacaagactcctcctacttgaacaattggacttggttgtatgggtatatattttttgaccaagtggaatgattaatcaagcaaagtaggtttcttctactccctaattaggatttttatgcagtcgtctgttgtttctcgttgaaattgtcttcaatctacttttttcttgtaagtttaaaaattgcaacgtaatgtagtttttttctagcaactataatgtcatctgcacaatagatttcataaagacatctaacatttagaacttggacgtcctttaattagatcaatattcaatagtattgcatctggatggcccataatctctcaaattaaattttgtttctctttcgaatctaaattaggaagatccgtatgagcaaaaagtacttagggtttgattggttctccctctgtcacccgcaaacgctgcgtttgcaggtggtagcggttattagcggttggcactaatcatagaaaccgctagatatcgctttgtaccgctcgaaatcgccagatttcaaaagctccttcccgcaagcgtttgcggttgcgggcggtagcggttagattaaaaataataataattaattaattaaaataattatgtcttccacccaaaccctatacttattcttatcagaaaaccctaatcaatgaaaccctattctctcaattatggcatccacccaaactgacaaaaatcaaagtcaaaatcaagaatcaaacgtaagtatgatctatcctttcatccattcattagctagtgtaattctcggaatatttcatggcatcgtttttttttattttgttgttttttaagttttttgattgaatacatgttttgatttgttttctcgattagaaaatcatttggtcaaacgagaccacatttgcgttacttcaacgggttattgtggagaaataaacggaagaatgcaaagaccccaaaatcagatttctaagtgatgttcaaaaagaaaatattcttaagaatattaacgtttggaaaaaatttgagttggagatgtgttaaaaatcgtttggatatcttgaagaaactttatcatatgtatagaggcaatccggaaaacccgcgagttcaacgttatttacagtttatcacactacttgatgcaatttttggtgatgtaccaaatgcataaagtattaagctttttcttacaaaatttatttatttttgaattttcagttttatttatggttttaattattaagtatgtttaatttttcaaatattatcaatttatcataataatatattgtatttttttcttttaatagtaatatattatatttattttggttattttttatttaattactatcgcacccgctggtttatcagtcataaaactcccgcaaacgcacctattaccaaacgctcaaccagtcgttcaaaacacttgataacgcttgaaaccgcaaccgcccgtttccgcaaactcccgcaaccgcaaccgcacccgctgcgtttaaaccagtcaggcccttagattcctattagcaacacggcgacgattaagagtacttgcatagactcccacaagtagttctataacctagatagtagatatccaaaacatctttctttgttctcgtttttcttgggattgataaaccctttagtaatcttttatgggcctaaattgaggagcttgatgcccaatatataggcctttttattttaagtgttcgaaaaatgttgtttatttacaaatgttttttcctttcgattcgacaaaataagtttgaaagttaggattagtgaacttagtgaacgtaacaacttatatgtttgattaaacgtaacaagatcctcaacttcacaattatatgtttgattaaacgtaacaacttagtgaacttacaaataaaaattaggaaactatataattcaatagatacattttgtttgatcttggttaatcaaatcttcagtacaacaaagcagcataaaacaattggttccaagtgtcgggaagacccggaagacaccaatggctacaatcagatgaacggtcaggatttcttttcaaagaagggttgagatctccactatatatcgaaggatgaccgtcgacacgaagagcagagagcatagttatatccatcaatgagacatgagacttcatctctttaaccacgtcgtctatcactttcttctggttcacgtatgaacttgttggatacgttgttccactaaacggtgtcgtttgtccgtagcagcttttacctccttgagttattgttgaagtttttgatcttgaagtccactcatttgggctaacatcacaaataaaagcatattgttttagagaaaaaaatagaagcagggaacagttttattaaagattataggaatggtaggatacaacattaatggttatgttggtggctatgtttatagtataatcttttgcaagttgcaatgaagagaagctttctcattggcaaaacttaagcaattggactattatttttgggaccctattcaaaaacacacagctcatatgtggacctttatatattaaaaaaacactattcttatccttatgtttctttctttttctgcactaatgcaatattgaaatctcttttcgacggcaaataatagaccatgccaaattgccattagccatcttcatttttttgacaaggaaaatagggattttcgttttgaaatgacatattataactcataagcaactactttttgttgaaacattatttacatttaaagaaaaactagtacaattatatacacacgtatttttcatcacgtctacactttctagctatagctagcaaaggccatgcacaatggtgggttactaaagactagagagagtagcttggtagcaactagcaagccaatttatttaatatagtttggcaacatctagcaaaaactatcaatccaacgcatatgtttcctatttattaatttgcgtcgttaatatcaagataattaatttatcaattatcaacactacacgtgcttatatatgtctcgtataatgctaattatcatcattcatcacatagctcccaaagtctcgtgtagtgttaaaaacaaagaaaaactaatttatgatagtttagtggttgaataattcattttaagattaagagagagtggtacatacttgtagtgtgtgggtgagaccgagaggaagaaaactctagtgagaggagaattgatataacgaaggacccaactagaccacgttcctagtccttttctcaacgccactaacctatccatgtcgccgtaatatctcccacctgtctccatctgctcccacctgtctcatcccaaaaaactttcactattcactcataatttacaataatgatctatatgttaccctcctagttataggtatgtgaaaaatttcacttatatagaggttataactttagcttaccctcgtaaagaacctgtgtggctccaccagtgaccagtgttgaacaatagaacgtcggctgtgcgccaagcattcgatgcatccacagagatttcgtcgagtttaagagttgtctttccgttaattttgtcgatgtctacaagataaggagctctatagaatgataccttcacgttgtagtcctgtcattgcatatacacattagcaaagaactggaagtaacttgaggtataacttaaggtttgaatggtaacaaacaatagtttgtttatcgcctttcaactaattttaatgaatagacctaaacttattttcagcaaattaaaattgttttcatttaagtgccttaaaagaataaagctgaaagctaaaattgttttcttatcggaaacttaaagaaagtattattaaagtaatataagaacttcaatttatagcaagaaaattaattcagattaattaaaatgacttctttctagtggtcttattctaatccgaagagcttagatcaaaattatctgaaaataaactaatattccatattcataccaaaaaaaagaagtataatactgtagattagtagtaactgatattgctttattggaccagtgaaactgtcaccgacgacgtcaagttgtgagggtaataatagttgaaaacgacgttcaaaattacaacttttgacctcaattttcacgaggttattcgagaaaacttgaccaaacagaaaaaaagtttcatttaccgacaatagaaaatttgttttgggaacttacaaggatcttgaaggtagagagaggatcttcatgaatgatgtgagtattaatggacggtgctgatgaagagatcatacatatcaacgactcccattggtttctacccaacgaatcaccaacgaacattatggttttgtctctcatttcttgtagaaacttcactccattgaatctgctttcccaaatggagtataatcagaaaggggttccataaataaatcattgcgtcgacattacatatttaaaataataagtacttattatattaaccgtaccaaactccacctaattaacagtaaaatcaatttgttttttgttaaaaacgaatctgttaaacttgtacttattacacatttagaaaaggagaatctctcataattaactaatagaaaaatatattataaagttgtatgtatgtaatacccctaattatgaaaaaaatgtagtgaaggaatgtctataaccataaaatattaaatactaacaaataatttgggatcattgtatgatccaaatactatcgtatatatatgacaattcttggtataaccagctagaatttgtttttgtctttttcataaagtaatcaaatttacaatcttggttggtatagtggccctaccaaaaattcatttgccaaagcataagttttactattggatgtcagattataacctcggtatcaataaaatgaatatttcttcctcaaaaacaagacaactaaaattaacattaaccaaattaatctaacaaagtagagctagtgacaagtgagtgagtttaaataacctagggacattgcagttgaaaggtttccaccggaacttgagatagtcggagtcaggtctgccgtaagtctggcagtcgaatcccggatctatgattcctcggccgcattctttagaccggtaaagtgggtaagtctcatcccgcacccactcgccggcgaacagatcacaactactatgattcaccgggaaaaccacctgacttcggcgaggatgcttcacgaagttgctgtggttgctttggatcggccgccggaagagagggagaggtgaagctgacgtcgcgttttggagaagaaacaagaagaggaaagtgagacattgaacagccgccattaaagaagcgcttgaagaaaagaaaagaaaagagagagagagaaacgagtaaagaagagaagttgttgttattatatgtttgtcctttgcatggaacttactaatacgtaatgttttcgaggactccatcttttaaaaggacgaaaaatatggggtcgggttttaatttattttcttataataattgaatttaagtatttatgctttacccataaataacaacatttaataccagtattagtgaattacgagttactgctccggactctgaaacttaaacggttttgggaaacacatataaaatcaatgtgtaacagtaaaacaaacttcaaacgtattatcaatagaaaaaaaggtaaaacaaacgtatcaagaattcaaggtatataaatataatagataacgagttaacgaccttctttatgatctcacaaggtatcaagattttgtaattgttccttagagaaaatacaaaaatgcagattctttgctttactttacctccatgtctagaatatgatcattttttttataattgtgaaaaagccacgtcactgtggtgatactcagtcaaagctaggtcaatgaaattaccaatttggcactgacagtggcagctgctagttgcgcacactcataaacggtaacgtttggaccgggtctaaattgggtactattgattaggacatggtttaattgatttgactgccggtttggtttggagcaacttaaactaatctggtccaataataatgggcttttactttgggctttaaagattctgattggacccactttactaaactggaatctggatgcttcgttatttgtgtagaatccgacccgattcgttttattgctctttttgcttcgtcgtcgatcttggcgctctggaaatttctcgtcgcaacgttcttctctattggctcaagttagatctccctttacttgtgtgagttttatttcacctttttctggggtttgtttattttgtgtactgatttcgttgctctgaaatcttagggtttgtattttgtaatgtctatgcttattgatggagctttcggtagtttgatcaaatttcaaatttcttatcgatagtttctcttccacgattttgttgggttagtagagtaggcctctggaactggaaattagaaaattttggctggaactgatgcatgtaaggtgttcgacgaaattcctctgagaaactattagtgacaagcttcttttttgaagttttactttcttttctgattctctaactgttgattagagtttagtttttcagtagttttattaattcctagtctccatttagttggaaggagcttattagttttcttttactaagctatctcttgctcaccttttcctttgtgaatgagtatatagacaaatgacctctttttgcttttgttttggtttgcagatcaaacactgttccagtaagccatggcgaagcatcaccctgatttgatcatgtgccggaaacaacccggaattgctattggacgactgtgtgagaaatgcgatgggaaatgcgtgatttgtgattcttatgtgcgtccgtgtactctagtacgtatttgtgatgaatgcaactacgggtcattccaaggtcggtgtgttatatgcggtggcgttggaatctcagatgcttattactgcaaagagtgtacacagcaggagaaagacagagatggttgccccaagattgttaaccttggcagtgcgaaaaccgatctcttctatgaacgcaagaaatacggattcaaaaaacgatgatagttcggtatttcgtgatttgtacggtcctttgattacttgatttggatctcttatgctatgtgtaaacttgtttgttgacccccgttgcataaaacatatattccaataaaacctgaagatattggatacaaaacctaagttatgctttgttttatgattttcttaagttacacatgtttctctcgattatttcttaatacttaaaaattatatatatcataatcttacaaagccaaaggaatatatttataaccagactcgaacaaacatgacaagacccgagattcatattcgagaaatgatgttgtgaagtccggttcatcgatcaagcagtcgatagtgatataaaattgagtctatcgtaaaatttatcccaccaaaatccaataatatcaccagtcttgaactttcttttatcaagaatgttactccatccgtgaaacttgaaatttccatcttgctcttttttcataataagagttgttgtaatcttcgaatcgtattcgtataaatccaacaattgtaccgaatcgtgttgtgacaattttacacgacgatgtttactaaaccatggaaataagtttttctctacaaactctttaggcattgttaatgtattactcaaacctgtgtctgatgctttcaactttatcaggatgttcaatgaatggcttggatcaaacggcttatcgtgacacaactcagttcttgccatgatttagcacagaaattatatgaatatcaggttttgtattgaagaatttgtttatgggttaaggatacatatatatatatatatataacaataattgtgttgcgtggatgattgtaattaagagtttttgacaaaacagatatggttttttctttctctcataaatatcataagattcactattgattaaacatttggtatttaaatataatcaaagtttaaaattagtactagattttaacccacggtataccgcgggacgatttattttgtaaaagtaatatatattaaaacttgcaaattttatttttataaaatatttatattttacagtttataattgttgttaagtaacgctataccacgaatcaatgagacaattgttaaaaaactgaagttttaacccctattaaaacaacatattaataatattttaaaaaattttaaatattaattcaaatacatccaccatataacacaattccaaaataaaatccgttctgtaatttctttacccgtcccgtgattttttttaaagtagtaattttaaaattttaagaattattttttatatataaaagttttgcaaattgtatcattctctaatacatttatattttatagtttaattttatatatagtaacattatacataccacataacatttttggttttatataatcttttctaaattaggattatttgatatatttaatattagtggtcttaaaaaataataaattaaagatttaacttgtattgaaacggtggattgattatattttacttttttattaatgttgattcaaaaacccgtccctccaaatccgtcttaccaaaaagccatttattttattaatattaattttattaatgatatgactctgaattataatctaaacattttagctaataacataggagtgcactatatttatttattatgggaatgtaccttatgacccgaatgcacttttacccaaatccaccaaaaaaaatcttgcaaaaatactatagagataataaacgatagtcggttctgataggtataagattagcaaatatattagttagcttttattagttaaagaatacaaattgaaaaggtatattacactttattcaaatatagtatcaaaacttatataacacagagatttgataattttttaattgttgagtacttttttttgtgctaatttttatgtgattaagatttaattgatttcgtatataaaattattaaattgttttacgaacttatttgtttataatttggtaacagatagatattcgaatatttagtatattttgctttagtttaggaaatctttgatgacccgtttttagatccaataagccctataatctagatattaacctgcagtataccgcatgtaggcttattatatattagttaaactaaaaacttttactgtaaagatgattttaaaatatatgatattattttatttgattttaaatgtatagtaaactgtgagttgtatatgttttgttgatattatctatattgtttagtgtttaagattatacacatgtagtttgattgttaatttaagagtttcacctgtattataccatcttgtattaatatcgatctaaacccgtcaattctaggattttcgagcttgtattaaaaattaaatcacatcatacacataaaaaaaatctaatatgttattaattattgtagtatataagattataaattttcaatataatatgtataaaattgaatataaatatttcaaattatgacctgttactcagtagaaagttttcttaaatctatttttcacccgttataatattttttcatgtattgaacaatttatattcgtttttaaaaattcaaattatggcatatgcgaaaaagtctaattctttttttataatgatgattttattttttcgaaaaatagaatcatataaagatgagaagtgaactataataattaataaaaaattaataagataatttagatatcaaatctaatttgttggttttaattggttactttttcggaaattaataatgtatttcgtttttctaattaaattaaattaattgaaatttatatatcaaatcttatatgttggttttgattggttattattttttgaaattaataatgtatttcgttttttaattaaatttaattaattaaattagtatttgactttttaatccttaaagagataaattaatttactctttaaatttttatttctaatggcatacctatgtaattacttataaaaattaaggttacatttaaaatgtacttctcaaataatatagtaggatcataatattttgacatgtatatagattttcttattaaatcatagtatgtgttactttaaagacttaatttttattttatttttaaaaaattgatgacataaatgattatatactggattctttctaatatatatgactgtaattattattatttttatagaaagacatatctttttaaccttgatattacccaaaaatattacaatttaaaagtaattatataatttgtttgtcaaaccagaaatgatctataaatataataataaaatttattcctttgattcactttaattaggggtaggttttcttaactcattgaaattaatattgtatgatcatcaatcacatcatatatctctaaaatctaattaaattggtcatccaattagttaatctttaaacataattatttactaagtaatgacatgtcatgtcgaaaacatataattgagctctgagtatagtttaaattccaagccaaataattgagcttgagtatagtttaaattccaaaatttggcggaaacgggttcgatcgcattaagaaactaaacctagtatttttttcattaaaaaaaagataggtgatcaatcataattttctatcacattacacaattgttataagctttttcgattttaatatgtatatgtaaatctatctttttccacttaccatgatatttagttatagaatgaattgtgactagtttctattttattcatatcttttgatttaaatttccattgtgaatgctttcaattcattttttttttccccactttctttagacgtcgtatctctctgcaaaatcataagaaaaggaaagaaaacaaaatttctccaaaagtcaactttctgtgagtgtgtgtatgtgttgtattgtaaaaacgtctccaaaagtcaactttcattatcctgagcagaagcatggcaagataggggttgaagcctttaatatctttattagttttagaggtcaacatccattagctctagtggtaactaaactcgtcaaacttttaagagcactatctacaatatctggatataacagaatcgtagtgtcttttaacctaagtcactatttgatatacaagacaagatcatctcaatctacgccttggaggatcgctgctacaataactggttcaacataccaacttaaccttatttttcgaattgtgtaagagcgtataattaatgtagcaaagggaatatacgtgataagtaagtttctaatttttaatgaaactatcttggaaaatattttcatgaaacatataaacattggtgactagtttttcttatattcttttctcattaacaatatgcagtggtttgttgatatttgaataagttcataaaataacatttttaaaatttttgttaaagttaattctaaagtatttggggggtttacgtcaatcttggcatacctaccaaatgtaaatgcatcatgttgttaaaaaaaagcaaaatatgtcttaaaatgttataaagttatgcgcttgaagcaactataataaataaaaaaagtatatataatttaacaaagtcttcgagactaaaggccggtgtgagacgttttgtggcgtctataaatatacaagaggtgagagagaaagaaaaaaagaaagagtaaaacaatgggttattcatcatcctcaagaattgggttatgtttgttcctcttcttcacatttgctcttctctcttctgctcgcatcagtctttcattttcaggtactttttctccctctttttatttttctgtatactcagtttcaactatttacagttttgtataaatatgttcttggttatccaattttcacgaactaaatttattgcctcaccagaatctttatccgttatctcataagaattttttttttttttctctggttttactcaaaaaagtatcgataacatatactagttcatatcatatctttcctcacataagaaaaagtgaaaatgtttgatactacatttattggccggtgatgtggtggtgttcacatgatccgtatgtaaaacagtgtttgtcttaaaagatcagctccagaatatcaccaaaagaaaaagaaaaaaaaattaattctccaaaacactaagaaaaaaaccttaattacacaaacaaaataaaaactggtatatttatcatctttatatatttcgtagatactaatgatatatttttggagattataaatttatagaggtttactgtatatagatgtaatatataggttgtaaaagattctttgtacactaaacctctataaatttacgacctatatattacatttacatacaataaacctctataaatttataatcgtggaaactaatgtattttactaaatttgaataatttatcttgtttaataatttatagaaatgatatttgggctaaatatcaatttctgattggagaaaattattaattcaacaagatattaatttatagagtattaatttatagaagtttcactgtacatgtatgtatgtaaatgaattaagggcagcgaataacacatgaacccataaaaaaaaaaatttgctctgcaggtgaacattgttaaaaagacatttcaatttatttgcttggcttaaatatcgtttttgaaattatatgaacttgaccaattcgatttacatgccaatcgccaagtatccttacatttttacattagtgcatgtcatcgtaattattccatgcaaatgaaattgcgagtttcacttctatatatatatataatagtcagttttaaaaatccccataaaaaaagaatagtcagatttaaaaatataaaagtaaagtaaattgacaataaaatgatgaatatgtatgactgtatgagccgaggaagcctatttttgctgaaaatacttgtttaataagagttgattctttaaacaagttgcaaatatctaagttttatgtcctctgtttccagcttgtatgtatcaaatttctctctatattcaaatcaagcgaacatgaaacacgaccctcgagattgtcttccctagtccccccctttcgccgatgactttttcacacggccaaatcttatatcttattaaaacaatatgttcatattttattacgctaataaaagcctttttttttttctgatgccgacgaatccgatgagaaagtagtgtacgtcacataaaagttataaactatgaaatctggagataaaaacaatattagtattaaggcttttattagcgtaatataatatgttcacacttcaaaagcgttgacattacgacaaaagaacaaggacagatcatactacgactaattaatccaatctaatatatctttttaaactacataaattatcaaattgaaatggaacgtagtccctcgtatttgtaagaaatccaagcaaagatttcgattttaaaaacctccaaacagaagaaaaaggtcgattttgttttacccgagttcgtgtgttttacataaactttgatggacaaaacataattttttgttttgtttaatatacaaacataaattttgaatgagtgtcgacattgttcaaaaacaaattggaaacgagggtattgagagttgaggtttatcttaaatactctagttgttaataatacgatagttcttatatacaaaagttgttagtattgtttaccaattttatctagtatagtactatgtttaaatgtatataaacaaccaaatatggacatgacagaaaatgaaatgacggtggtgccagaacggtcattgatggtgagcaccaacgactacagtgaccctacagctaacggtagacatgatccaccccgtggaggcagaggacgcagacgttaagagagaggataattttcttaattttccgactcctcttgcaagcttgcaaataatctatatatatagaaaacagtaaaagtagttttaaaaacgagttatatatgtgatatcagagtgtgtgtgtgtgtaatatataatacttcatttgcatttgtgttctctacatcgacttcaacttgttattcttacctagattaatatatgtgcagtgtgctacatgtaattttatgaatatttgtttttgttaatgccggcatattccaatcgattttatatatagaaattgttgtgtattgaaaaattgttaaacatctacttttgaacctacaaaaacaaaaaaacatttgaataagaattgatattgatgtgtgtgaaagcataggtctgcaaacaaaagaaagtgacatagagcgacaaaaatacgaagaaaatggatttcgatacgttaagtgatgctgcattggccagaagaaacaaacacgagatcgaaagctcaaacaataacctaagcccatcaaacaagatgatagtactatctaacaaaatttgattttttgcattcattatgttagcgtgtaatcagtaattcagacataacctttgatctcctaatcatgtaatagttttatctaaccaatgaaccataataaattgggttttgatgtggaacactttctacaatgtttttagaacatttatcttagacctaattttctgaaaacaaatcatataagtttgttgtaaagtaacactcaattcatgtatatttcacatgcttaattatttcattttctaaaacatgatcctagcacatattttttgtttgaatatataattgattaatcaaactgaagagttatgtacaaatagcctaaaggtaagactttttataatgggacaaaaaagtagggttaataataataaataacatttttatgtgattggaagaaataaacaaaataaataggtcaatttgattattttttcatgaattaatttgtgtatgggccgtatttattcattaaacccaacaatcattaaacagataggcccaaatacttattaagaatcttcttcatcgagaaatattcaaatgctcccaaaagctcaggaggccaattcctaaacggaatccatcactttgactgaagaagattcttcaattcaaacacacacacaacgaagaagacgaagacgaagaagacgaagacgaagaagaagcgatgttcatgatcaaaaacctcacacgaatttcaccaaatacatcatcaatcatcaccagattcagaaactccggatcatcatcattatcatacactctcgcttctcgtttctgcacagctcaagagactcagattcaatctccagctaaaattccaaatgatgtggatcggagtcagtattcaggtttgccaccgacgagagaaggagagaagccgagagtagtggttctcgggtcgggttgggcgggttgtcgattgatgaaagggatcgatacgaatctctacgacgtcgtttgtgtttctccgagaaaccatatggttttcactcctcttcttgcttctacttgtgttggtactctcgaatttaggtctgttgctgaacctatctcacgtattcaacctgcgatttctagagagcctggttcttttttcttcctcgctaattgctctcgtcttgatgctgatgctcatgaggtattgcttccgtttctagatgtttctaatttctgagattatgtttctaagttttgcgagattttcagatcaatttggttagtgatgatgcaggaaccatgtttaagtttaagatgcaaatctctggctttaggtagatgttagtgtatctcttagttttagagaaattagcttgattttgagagttgatgatggtagaagaaaatagagggagaagagtaatggagtttcatagtaaaatgtgagatttagttttgtttttgtgtgctctcattgtattgtttgttattggtaataggttcattgtgagactttgactgatggattgaacacattaaagccatggaagtttaagattgcttatgataagcttgtgatagcaagtggtgcagaggcttctacgtttggaatccatggtgttatggaaaatgcgatcttccttcgtgaagttcaccatgctcaggagattcgtaggaagctacttttgaatctgatgctctctgatactcctggtaaacagaatttatctcctgcaggataagaatcagaatgagaatgagaacgtaacagtcgttgcacgatttgtttaattaggtatatcgaaagaggagaaaaggaggctgttacattgtgttgtggttggtggtggaccaactggtgttgagtttagtggtgaactgagtgactttattatgaaagatgttcgtcaacgatatgcccatgttaaggacgacattcatgttactttgatagaggtttgtttctactctttcgattcctctttaggtgtgtttatcacgttaggaattgtttttgaggtgagtaattttttacaggccagggatattctttcatccttcgatgatcgtctcagacgttatgctatcaagcagttaaacaaggtgaactcattttgaagttagaacatgtaaaggttttgagcctacttttatggagcgtttcttcttaagaactactggttttgatttacattagtctggagtacggtttgtgcgagggattgtgaaagatgtgcagtctcagaagttaatacttgacgatggcacagaggttccctacggactcttagtgtggtccactggtgttggtccttctcctttcgttaggtctcttggtcttccaaaagatcctactggaaggttagttcgaccactccattacaccctttttaattaaaaaaaatattaaacatcaactcaactttttcgatgtttatctctataggattggcattgacgaatggatgcgtgtaccttcagtgcaagacgtgtttgccattggtgactgcagcggatatctggagaccaccggaaaaccgactcttcctgctctagctcaggtagataaacttaaatacttttttagcctcttatctcttttttctaagaaattggattatgttttgtggtattgacttcatacctttcttatatgttactgatcaattaaggtagctgagagagaaggcaaatacttggcgaatctactaaatgcgatcgggaaaggcaatggaggacgagccaacagcgcaaaggagatagaacttggagttccctttgtgtataagcaccttggaagcatggctactatcggtcgatacaaagccctagtcgaccttcgcgagagcaaggtaacaaaatttgactcgatatttctttggtatttcattcataaacatgtgtttgaaggagattacttgagcaggacgcaaaagggatatcaatgactggtttcgtgagctggttcatatggagatcggcgtacctgactcgagtcataagctggagaaaccgattctatgtcgctatcaactggttcaccactttcgtttttggtcgtgacattagccgtatctaaggttttgtacaaagtctcaatctcggcctactgtaaatggtgtcgtttgtacagagacacatcaataacataacctcaaggtgaagagaatgttttaaactgtttttttttttggttctttgaaatattacggtattttgttggttgagtgttcattggaaagaaaaataatgtttcaaaatgagaattttaatagtctttttgtaaaaatgattttattttcatgatgaccgatttaatggatgatttcacggttctacaattattatttgcaacacaaaagtggttcttcatgtaccatgtcatagtaagattatttaactatgaataactgtctttataccacgctagatatctttcgtaaaaattacatagcttccattaacttgtaataattcacattatacaaaacaattgcacctataggtaatgtacaaacactaaatctttgatcagtagagtaagaggatcttaacgaatttaatagttaaagacattaaagcatactaaaaactaataatcatttggtactatatttgtggattttgtggacagaacctgaagaagttattataaaatattgaagtttggatcttatattcacatgttcatgtcagttgtcacgcatgctcgtatattctctccaagtgtatgcatctccatactatacttgtaatgcaattcaatagtatatattatgtcgccgtattaatttaagtccttgtagtcatttctttatctctaaccttttttgtatcgatctttcgtcgtcctacttttagtttcttaatcggtttacacagaaacataatgcaaaacaataatattttaagataaggtaatgtcatgtacagttagtgaaaggacaagagagggaacaatgtgaagtgagaaaataaaataattgataagtgacagtgtcgtggttatgtctttaaaatcatttgatcgctcttcgtttggctttatgtcccattccgatctcttgtctatgtgtggaaagtgctatggattgctactaacttaattctaaaaccaaaagtatatgaagcacatatataaccaataagtgcctctacaaatatcttctggtttcctcattataaaattataaatatataaaatacactttgctggcagaatatttcgttacatcattagtaatccaaaggtttagtttgtctttaatcaattatttatgaaacaacaatgtatttttttccattatcagaaagacaactatatatatgaagttatgaactataaagacgtgataatatgtagatcgtattaactatatatttttggtcgtttataaaacttattatggaactggaatcgggttatgatgatacgacaaagacaccagtacaaaccattatgttataaacccctattccacaataactatttaaatgagtattttgttatgataacttgaaaccgcccagtgatatttttatttttatttcttgaagaaaaaaatatatgaaactcaaaactccggcacatgattttcttcgagaaaacagttacctcttgttgaacatatatgtagagtgtgtaactgtgtattcattcatgaacgtgaccaaatgtatgaaataagtatgccaacaagatgtagaactatgactttacctttgagcgatatttacctttgcttaagttttgccccaaccaactgagaaacctttgtctacttgcttggtcattactcatgagtgagtgttactccgggaaacaaaatcattactaaagaatgttattggacccactgatccagaaagttatatatgttgaagtgttcgataaaacaaatccctaaaaaaaattctctaactgaaaattccaaaccaaaacatggatgttctagctctcgaatctccaaaacatgcaccgtcatgtaaatttcatattgatcgatgggaatatctctagttgtaagttgtaaccaataatccactaaattaatgtttattaacaagaacacttttttgttcgtatgaaaagtttggtgaaccgaacaaaaaagagagaaatgtctatataagatcaagtaattcattggatagttggatatcttttagaaagtagagaaccattgtttctcaatgaacagaaaacgacggtgtttcgtcggttcacacgtgcatggacgtacggcccatcttttattgtccaaagcatctatttaaacactcttactggtagacaaacctaacctttaattaagcattatgttttaatgtttcatctttttatcaacaaatagcttgatttccggctattatagagtaatattatctttgaataaaacgttgttagatattaaaccatccatttgcatggtttgaactttatgaagttgaagagacgtgtatgtggacatgatagatcgtgatctttaaccgtttttcttatttatggttgtatgcttctatataaaataacgaatttaaaaactagtttactatttctttatagacctagctacgtgttttatgttacacacacataaattctttcgattataatggcttttgacttttctacaagtctttctttggaaatgaaactcgtgtggtgcgccttttgatttatttcgatatgtatagcgcatctcttcctctctaaaaacctctatataaatcaggatacatattctactcgtgataacaattatctagtaattaagttgttttcaatcttatgatattttttaacatggcatcaaaaccacaaaactagatatttaaaactttttcgtttgacatcactcgtcatgaatgatgaaggaaactagctagtactttttttttttatctagctagtacttgactactggctttattctaattataatgcgtttgtactcgaaatacggggccatacatacatgcaataaaatttcggcgactgaaaatcgaagtatccttacatcacaagctagattgacaattgacggaccattagtgaattctctgttggttttattgagtacgaacaagatcaatctacttttttaacgtgttatgtttcagttttgagattgttaaagatctttggaataatataaccgtacaatattctaagattattaacggctctcgcatacaataactaaattaggaattggtaaactacaaacagatagtatgatgatgtaatgttggtaaatgagaatttggtttatgaaaaaaaatatatatacttttcataacaaaaaacaaaaaaacaagaagaagaagaagaaggaaaaatagtagagatatacaactcatctgtgacaaatataaggtttggaaatcgtcgtcgtggtaatgacaatgagcctagataatgtctaaggctatgaattcgaacattcttacctattacctatgatctatatactacatgacctgaatgcaacgtactctatggttcaaagcaagacaagcttgcaccacttagttgtggtccagagtccctcttttggtgcttccgaattgtgatgatgactcaaaatgtggtcgtaatgttcatgcagtacatgaaatttttcttttaccaagcgtcatgcactagattcttgtgcttaatttgtgactatgcatgagccacgtgaatgcatattgaatcgtgaaaattgtagctttttgctaggtcgtttcgcttatttacgagttggtcgattatttcgtatggtctttaatatatatgcacatcgatgagaacttataattatcatcatttgagtgatctccataacatctctttatatatagtaaaagatttttttttaaacttaatttaaaattgggaaatgtccgtgttgcacatttatgcgcatcttctctgatatcagatcgttgaaaaaaattatgagaaaattcgaatttgaagtgggaaagtgttgtggggttgtttacaaaaaatgcaaggtgcatgcttgatacacgaaaagacatcatttctttacgacgtgttctataccaactccattccctcaacacttgtattatttttcacttctgttttaattttgtctcaatcaaaagttgtgtgtgcaagtgtggttcggcttttttcattagttgtaacgaggcaaaagtttagtgaaaagcttcaccaatctttaaccaaaaaaaaagagctttagcaatgtcttagaatttcttgatctttttattgagatcatttttcgtataccacataacgttgtttttttgttatcgtataaccccgcattttagacatatcttcggtttaaatacaaaaaggtattactatagaattatacaaaacctacggaaagcatattcccccaggcccacctttttgatattatttttggtaattaacgtattaattaatatctggtttcttaagaaaataattttctaacttgggtaacatagtgggtatctacgaaatgattcctttatcgtacacgaccttttcatgaaatacggatggttaaatacaaataatataagatgtataaaacacgtagagacgtttatgataagcgcagttagtcgtacgtagatagagaaatatacgaatcatatactataatagattatcaaaatggcaaaacataatcataactagtcgtatttaaaattttaaatctgtattataaagagaaaatataaggattcatgtgcaaatgcataagtgaacactattttagtattttttcaagacaatcttgtatttttattgatttctattagctatactaaaagatgatggtaacttaaaacgtaaacaagacatgattttttttttttttgtgcacctacaagacatgaatttaaattgttgaatcaccaacctcctcccctaaaatggagtattttgtcctagaccctagttcgatactcggttaggaggcggtgtcgactttttttggggttttgggtttttatttttggtctgcctaacaataatggttgactccggacaaaacagagtatgtgctttgttctaaaaaaattcatcttcctttaatgaaaaagaaaagaaaacaaatggtcttatataaaatttaaatgcaaaagacttgatagcaatttattttctatctttaaaattgaaaaagagttataatttcgaaaaatgtataattattataaccaaatttaaaaaatagtaaagtaatttttaagttcactatcaattcaacggattaaacagtcataactgtattaaccaattttgtgaaaggttatgtaagattgttcaaattattaatggtcgaaaaatgtaaattatttattgattagttgctatgaattgtataatataaagaaaaaaaaatatggcccttcggaaatcacgaggaaatcgaaggatgtcctccaccatgtgcgtctgctaaataacaaacacatacttctctttgcattttggggtttattctcaattattattctcatatcttaacacatatatcttttatataaagtagaaatggtacgtagcaagtagcccacagtagtaaacatttgtcgaatagctagcactgtcacgtgcaaactcatgtcttcgcacacacatcatttttgtaactcgtccctttcggcttttccttggttttacttttcactcataacaattggaaaagtccatgaaaatataggctggtataaaatcaattattatgaaaggtatatgagtatttaggatcttacaaaaatatatttcaaatatcttatttaatttgctaatacatatatttagccgagttgtttttagcgatcaaaaccttttttttttccgaacgatcaaaacattataaaactcaaatacttcaaacattataagactttgtgatttgtaagcttatttccaagccgtaatttacatcatttggaaagagaaaaattcgaggcttcacactaccattgctaaaccagcagctaatctggtcaaagagattcaggtcaccatttgtgctaaattagatcgtctagatcgcagcaaaataatattacattcaccttcagctggtccaactcggcagtctcaagaaagacctttcaacctgatttcgatttattcaaccttaaatttcttgggtaactccttcacctatggtcttgtgtttcactttatttctctcttcaaaaaaaaaaatttaagcagtgtaatttcaaatgatgtcttctttagtaaagaaagatgaataaaggttcttaaagataaacaaaaagaaaagaaaggatagttattaggagatttcggggattatgagattgatttgaaaggaaagttaatatcataaaatatattcttattattaaataggtagatttcctattgttccatatgcaaagaacttgttaatcaagttataattttgtataaataagcatattagcctattgaataaaattgagagaaactatatcacttctaaaatttcctccaaacttatcatggttttttctgtcgttataacttcaaatacgatgtagccacatagatgatgaactccaacgggtatatgtggatccaacaaagatgatgacatgatgttgctgtgaattatgagcatgaaccgattgatgatttcgttcacttcacatggtgacataagatgatggagatacacaactactaaagtattttgctatcgaattgataatcttatggcgaggtataaacgccattagtgacccaatagtgggtataaaaactgtgaagatgatttaatgattgtccaatgttatacgtgttaccacgtatgagcttgcggaagagtattagaaaatctcgaagattacgagatcaatttgaaaagaaagttaatattgtaaaatatatgtctattgtgaaataggtatatttcctattgtcccaatataaaaaacttattaatcaaattataactttatataaataagtatattagactattgaataaaattgagaaaaactattctactattaacgttttctctccaaacttatcaatagtctttctattaagcggacctatgactacatgtttgtctaggtgagcctatgcaatttagttaggcttagatatcacccggcagtagctacataactaattgaagtcttttctatgtttcttattactataaatcggtgcgtttaggtttccaactcgggtcatagacggtcgatagtcatgtgaaaatgtttctttccaaataaagggaagttatttcaagtaattttcatgagtactagcataatgtgaaatgtattcaaatatgtgtataattgtagaaaatgttaatgcttaaatcgtaaatgcgtgttggcaaaacagttaagagaaatgaaaaggcagaggaaacgcctcaattatgttttttttttgtataattcaatgtctcctctactaaccatacatgtcttgattctttaatggcgttgtagttttgttatgaatatataagttcactattcaaaatattttaggtgctcattaaaatatcgttgaaattactctattattatgctatttttatataaccattcaaagcattttggccgcacaatttgctcgatttgtgttgtttcttccgtatgaagtgcttttcttcaatccaactgatttgcctacaaataataggggatctcgctggtataattaatgtaatgaaaaaacataaattttatttccaccaactacttttatgacaaaaaaatgaaaaatatagataaacaaaaaatcaaccaattacgttgtataaaatcggtgatggcaattgggaaagaaaagaaaatcggtgatggtggactattttaaattaattaaaaacaatacaaaccggttatttaggtaaaataaatcagagtgatgtgccacttatatttaaattttcctcagctaactaatttctagtactatatattaatactaacctttgattttagatttgctttttcttttattgcgagtttgtcatttttttttaacttcttgtcatttttacatttaattttcttttactactatatactactattagccatcagttttctcctatttagtttttaggataactaaaatttcaagaaatattgtatttggtgcataatacattggggttggtagattctccatagtaagaaatgaatataatttagttggtatacttggtacgtgcaaggaaaaaccaagaaatattcatcttcttatcacaattgcttatattaggaaataaatcagagaaatatattcttaacttacacgaattgaaatggtgaaacaaattatggtaaagttttgttcttcttaaaattttattacttactttagcgtgcgtgtcacacatttctgaccaattttgttttcacttaacaacgtaaccaaaagtattaaacagcaactttaacccaaaaaaacagcaaaattacccattttatccttcaaataaataaaaagttataagaaaacaaaaacaaaaattggagtctttctcattgtcgacacatcttctctctttatataaacaaatctcacaaaccccaaaaattcatcaaaccctttcttcaccacattattttcactgagcgcataacatttttgagacaagagactctctctctctctcttctctctttctctccccctctctccggcgatggttgttgctatggaccaacgcaccaatgtgaacggagatcccggcgccggagaccggaagaaagaagaaaggtttgatccgagtgcacaaccaccgttcaagatcggagatataagggcggcgattcctaagcactgttgggttaagagtcctttgagatcaatgagttacgtcgtcagagacattatcgccgtcgcggctttggccatcgctgccgtgtatgttgatagctggttcctttggcctctttattgggccgcccaaggaacacttttctgggccatctttgttctcggccacgactggtataatttcttaatcttacgtttaacattttcattttaatttaattaatccttctttatcaactaatctcttaaatttttcattttttctaattgtttgtgttactttttgcttttttaattgcctcgaattcttaaattacttagaatacacgttcgatgagtattgtcgctaacttcaatatttgttcttttgaggttactttattttttttgtaatattaaaaaacaaaacaggaaaagaggatccaagatttctgtttttagatatttttcttcaataacgttccacgatgatgattagtcgtaagactcgtaacaaaatatcttttctattattaatgttaattccgcatttcatggatctacgttccaagtttccaattatttctcctctagatctccggaacttttaattagaaattaaatattttatacaatgtttttattaactctttttatgtgtgtaccaatgtactttcgagatttatacacgtcatatatagattttcttactttcttaaggtgtcttaaattaaaacaaacatggaaaagcaatatttttttgcagtaaatgtgatatatactatgaataataattgaatgtgtaaatcatgatacagtggacatgggagtttctcagacattcctctactgaatagtgtggttggtcacattcttcattctttcatcctcgttccttaccatggttggtaagttacttatttttattcttttctactattatttctctttttactgtttattttgttatttatggtgcatggtatcaagttaatctgtttgatttttgttccatctttttttggtataggcagattttgtaatttaattaatgcatgtgactgtgtggtggcttttatttttccactccaaaagcatcaaatctttagtaaccaaagaaaaagaatcaatacttttattaactgctgtgggcctatttatggccctttagccaacctgaacttgaagaaattaatgcacctttgtgtaattttttttttaaagccaaatgattttgatatatgtcaatctttatatgtattcatcagttgatatcattaaaaaaagtagatctttatgtatcatttttacgaaacattatagtatttgtttgttacttacttatccctagttataaatttgagattgttagaatctgccccgaaaacgacattatatgacagatgtatttataatttacgaattgaaatgttaatattaattgggttatgcaggagaataagccaccggacacaccaccagaaccatggccatgttgaaaacgacgagtcatgggttccggtaatctttccctctctcatcagtgtactcttgtctttttcattttatatttattttcccgtcgaataatttatatgcttaaaacacttagaaaattctatgttttttaatatgttttagttttagttttagtttaggcaacttgtcagttttttgttttctagctgtagtaaaaaaagatttgcaagtgtcgtagttcagtctgtaattgattttttataggaccaactctatcgtagtatataagttaaataatggaccactaatattcgagtgcttcgcatagaacgattctcctcgaaatgcgaatacttttcttccattactttttgagtttttttggcgttttcgttatgttttgtctatatcttagaattaaaaaaatgcacatgcaatatattgataaacacgattaaaagcataatgtaaatttctacgagtactaataataatcagtcattttaattaaaacgtttcagttaccagaaagggtgtacaagaaattgccccacagtactcggatgctcagatacactgtccctctccccatgctcgcatatcctctctatttggtaaattttgaaattcccaaacctttatagttgatttgagattgttaagagtaaaatatatttgatattgggggattgattttatagtgctacagaagtcctggaaaagaaggatcacattttaacccatacagtagtttatttgctccaagcgagagaaagcttattgcaacttcaactacttgttggtccataatgttcgtcagtcttatcgctctatctttcgtcttcggtccactcgcggttcttaaagtctacggtgtaccgtacattgtaagtcatacgaaaattcatatcttataatgatcacttttagatatttatacgttttgacataagtttggattttctgtttaatcagatctttgtgatgtggttggatgctgtcacgtatttgcatcatcatggtcacgatgagaagttgccttggtatagaggcaaggtaagtaaaatcaaatatatatgttttgtaacagaaaattagcgatgttatggattaatggatttgtttgattaataggaatggagttatctacgtggaggattaacaacaattgatagagattacggaatctttaacaacattcatcacgacattggaactcacgtgatccatcatctcttcccacaaatccctcactatcacttggtcgacgccgtgagtgatcatttcattacattatattgagatttaatacatagtgttactagaaaaggtgattaataattagggattgtttaattgattaatgacagacgaaagcagctaaacatgtgttgggaagatactacagagaaccaaagacgtcaggagcaataccgatccacttggtggagagtttggtcgcaagtattaagaaagatcattacgtcagcgacactggtgatattgtcttctacgagacagatccagatctctacgtttacgcttctgacaaatctaaaatcaattaatctccatttgtttagctctattaggaataaaccagcccacttttaaaatttttatttcttgttgtttttaagttaaaagtgtactcgtgaaactcttttttttttcttttttttttattaatgtatttacattacaaggcgtaaagttttgttatttctcttttcttcttttagttaccatcaaaaagatttcaatacttttggttcagacaaaagaaaaagacagttccactgaaagtacgacaaaatgcacgccgcttatgggtccctttcgtaacaacaatgtgtcacagagttgtcgctgttttttttaaaagtaatgggcctatttcaaggcccaaatattatatgaagtctcttgattacatatctaatttttaaacaacaaatccatactacagtttagtttagtttagttttgtgctataataataaactggacagtcacggcaaaagacatcaaaacaaaatgaaatggattggacaatcatgacaaaagacatcaaaatcgatgatctaatgaacgatatgaaatggacggtgatcatgttgtttattttattaaaaaaagctaatctaatggatgtattttattaaaaaaagctaatctaatggatgaaattcaagacatctacacaagttcttaagataaatttttatactttatttgttgattaactttgttagtttctgtgcttattaatttattagaactgtggtagtttatggctgttattccttctttcttttgtgtcaatttaatgatatgattaaagacttaaaaagataaaaaaaaaacgtttggttttggtattgcgcaagttatatgtcgagctttaggccctgaatggatgctgattttggattcagtttttgaatttagattttagtttatagattttagattttagttttagatttttattattatatttttgtttcaaaaaccccaaaaaattggtttttggtttttgagaaaaataacgttgattgagtaaaaactagatttcctaaattttaggagaactaaaaaactaaaatcatgaatggaaaactacaagaaaatagtttttttaaattgtagggaaaccaaaattttaaaatcttgattggtatgaaaataagtttttggaaaacaaaaaccaaaaactcttacaaaatcttacaaaatctacaaaatctacaaaacattagtagttttaatagtggtggactgagtttattagtttgcgttattcgtagaaaaagttaaaaatttgaatggttttttagtccatcaataaaaaatgatgtagtttatagctattagcccaaacaaattaataaacactaaaacaataaagagatttttttttcttctttacaaattttgcctgtttagcaaaatggaaaacaaaatcatcaaagcttgtatggaggtaatgcaaatcctcatcttaatttctagacattaaccgttaatatttcaaaccattgacatcatgaaccactaaaagtacagttccaaagtcagagtctaaataatgctgtcaacatccatggaaaatttcatgcatatatatcatgatctcattatccactttgttcactacactacaatacaaaaattgatcaaaactcatgtaccaaaaattctagctattaattaaaaaaaaactacctaaaatctgtttataaattttagtgagtaaaagaatagcacaatgggtttctgatatagaaatgcagaaagcctaatatgaactgatagtaataattctacaagttatacagagacatgttaaatgataaaaatactggaaattaaggaacctaaaaccaaaatctgtagcaatttgggcccttcttcaaaagctatgtaccacacttaatagctcagctttatgactatataatatatacatttagtgacaaagaacaaactcaaaccaagccgattacaaaactctgggataatctatataactatcatcacttatacataaaattacaacaacaataatcagatcacttcgactctcgccggaaactgttgtatccctgtagtctcctcttcagccggagactctctagaggcaacaagtttcacagaaaaaggagcagcgggaacacacttttgtctcgctttagcaaagcttggagcaagaacagtttgcagccactgatcaaatgttttctcttcatctgatgaccatcttaaagcagcaagaatcttaaggatcacatcgttttcgatctctagatgtgtttcaggtccaaaagacagatgaaatagcgaaagaatattcctttttatgttttttgctaactcatcaaagtcaataagcttgaacgtcactttcccatctacttgttccacaaaatcctcaagccaagcttctgtgttctccgacattgtatacgcttcgtcttcgtttgcttcaatctcatccacaggaagatttagatcaagaaacgaacgctgagacttaagggctcgaagctctgtcacctctgtttctgcctcctcctgtcttctcttattgggaccattcttgttaacatttgaagtgtctgctagttttatctgaagtgtccagtttttggcattgagaactctttcctcggagtatttgactggttcttcaagaacatgacaatcactggctttatcacttccagaaatagtagcaacaactataacatttttcatactgatctctctcccatgcgagtcacggagttttccagttctcatagcctcagacaatctgatctgatcagggaactcggccttttccacgttttcgatgaaaacaacagaatccgcacgtctcgccacttcgccagcaatgtaatcaacaactgttttccctctgaatctatcgtcaagactgtcttgtgacttgaaatccacacagatgaagttgtcttgtccaccacagaagacttcagcaagagctaatgctactttcttcttcccggctttatcaggtccaagaagagcaagccaaacattacttgtggttgctacgtggttgtttcttctcctggactcatctctgtatccacaaacaatttcgctaatcgcattcacagcttcgttctgaaaaccgacttttcgagagagtagttccctgagagacttgaaatctttgcagtatctcgaagctgacaacaattgtttctctttgatcacctcaaagtctctcctttcaactgatactggtgtgcttggttcttggttcttcgatgcgtagattgttcccaaccctaaatctgttgtaacaaagctcaaaggcgagttcgttgttgaacttgagagatcctcagtatgttttggctttgagattttgactgataaaccaggttggtgtggcggattctgcggtagagccaccatcccttgaaagctttcagacgtcctagtgcaaacaattttctcagttgggcttccaagactcatcttggtctggctagaagaaccaagctgaagcgggaactgcggtctaacgggctgaaaactgagtttaggaaacgccggagtttgatggattctttgacaaatgtcgtcccatttcttctgcagagcgggaatccgagaggctaatacgtttggatcatctttaacctgcactgaatgagaagtaaacactctcaagatattgcattacaagcaaaaacataatgaaaactagttttgttcatagaggctacacctttccgagatttcctttctcgtgttcatgctccacatttcgtaaccaagaaggtaacttctccgaacactgatcatcgatcatcgaccccgacttagcaaaggcggtgacttcttgctcatacttctcgttacaaagatgacaccgaggtaaagtctgattcatcgagctactagacggtattctaaaatccgatgtggatgagaaaaaccctccaaatggaacaaaagatcccatcaaactgtatataaacacataacaccacagtttcaataaaaatattcaaactttggatacaaaacaatcaaacatagagaataaaacaaacctagattttggataaagcccttgacttgaagatgtaataggaagaagatgaagattccaatctttatcaatcgttggaaacctctcaatcagcttcaaatacgtctcattactcgaaacacttccaataaaccaaagtttctcacggtgaagcttcaacaaatcagcgagcttcaacacaaacttctcaatcacatcaacagagaaaacatcactagctaaaacctttaactctccaaggttcaaaaccatccctgacttcaatctccctaaatcatcaaactttatatctattcttgatccatcaactaaaacttcactaatctttatactaactacacttaacccactaatctccaaaggtaaaaaaccaaactttcctctgtttatagaatcagtaaacgttttaagagcttcaacaccacaaacaccaactagtaatggattcttcttatctttcctcgctaaaacttcaccgattcttctacagttctcgtcgagatcaccaaacggaaacccgaatctaacccgacccgagtcagattccggtaagttacataaaaacagaggaggaatacgagatcttgacgtgaaccgtgaagagaattgagacgtcaccggaggatgaagcacgtcgagtttaatgtcggtgcttctaaacccggcttcaccaaagacccgactcacaatcgggtcatctaaaatggatagtataaaatacttcaactcaactttcaaaaccgacgtcgtttccgtgttgttgtttccatggatttgatgaagatgataagtctctggatgacgtcgttgagtcgcttgagatcttttgatcgccgccatgagagagtttgagaccggaggatcttcttccaccgtcgtcgttggtgttgatttcgaagaaggtaatctgtctagagaaacgccgacgcagagctcaagcgcgcgaaactggagacgtgaagagtacggtgtgttgtgggcggcgcgtgagatacacacttctcggagaatcgatgaaggcattgttaaaagacctgaaacggcgtgaagtgacgtcgtttgtgcgtggcttcgacgacgcgcgacggagactgcgtcgtctaatgcacgcgctgtttcttccgttaaacattgtctcgccgtggttactggtgtcggcatcgtcgccggtttagttataaaaaattcgaaattaaaagtaaaccaaaccacaacaccaatcaataaaattcatacaagaaactataaacaaaaacaaagcgtgaaatttttaaagctggaaatgggatttttacgacaaagaaatgaaaaccgtgtagtcgcttttatgaaaaagaagtgtttttaatttataatatatagtttttatgttttatgtttgtacgtttctttctttggtttcaatcctcagaagcttgtgaagatagatatgtaagaaagaagagtcgctgtttggtggtctattggcgatggaacccactaatatattttatatttatattttgaatgattatttgttattattatgaaatgtttttgtttgtgtaatttttgttgttgttgttgttatgtgttgttatgtgttgccccaaatactcgtgtatattgaaggaggaaaggcaaagaaaggcacatgtggtgagcatagattctctatggcccaactcaaagatcttcctttgcttccattcgcttaaactcttcaaattttcaattaagtttggatttgacaatccacattgtttttcacaattattcttctttttattgtttttgattttctctcttctcttattcttatctaaagtagctagacagaaaaatatctaagtgtatgagtgagtgagtatctatgccaaatcttcttctttccgttttttccaacttgtattcgtattgtgaacattaactaactatattccaaaaggtaatagttcgattcagaccaagtaattcattttaattgtgttgagcttttgttagttttgttcaaccaacttctgttagctttattcctatattgattgttggaaaaaaaaatattaagaattttactgtaatttgataaataaaccaaaatttgtttcacggtaccaaacaaacagattaattatccaagtttgaaaacattggcgacataataaactagaatgatgattacttcttttagtatattacgaagaaatcttggataagagatgatctataagaggaaatgtcaaagactttgttcgtatattaacaatatgatatgaatattttggaacataaacaatgaatctttttctaaatcacatatatagctagaagtctatttcgatgtgtttagttcttttatagatggttaaatgttggacattataaattgaagatttatcacaagacgctgagaatggagatgaatcagtgtaacaatcatctagaaggtcattcaacgaaatataaaactaagatacactatgttacaaaagaaaaatatatattggccattgcactgtattaagccaataaagatgcatagtgctagaattcacaacaagttaactagtaaaagatgcatagtttctaaacagaatcagttcagagagataatctgtgtacttacgggttttaaaatgtcggatatctatttacatatggctatgttaagagtttaaaagctatacaaagattgtaatcgagtgttttggaaaaaaattaaacacaatgatgatgatagaaatatttttgttcagaaaaagttaaaatgaattgatttgcatactgactgatactttacaaatagattttttttttgtgaaaattcaattatttaaattttgagacgtataacttgaagataatagaaatgattaacaacaagtcaacttaattataactaagcatatattcagtggtagacagtgatataattttacttttaagagattagatggatgtgatatggtaaagaataaaagcatgagtaagtgattaggccccaactcctttataaattccaccaccaccatttatatgcttttttgtttttggtgtcattgtcattcaaaaagtctttcattaataatcatgaagaagaaaaaaaaaaacttccttttttgttttacttttatcttccacattttatattctccgccacaaaggtctccttttgtatttcccctttaggaaaaggaaatttactcaatgaccaatcattattaccataaaatagttttattattttcaggccaattaaagacaaacaaacattgatcattggactaccggctgcttttcaatttaattatatttttggtttcagctaatttataaattagtaaattttgattcaaatattaatttgatcgcttgtatgatttaaatttaattcgattggtaattcaaaatcataatagtttttttgtacaaaataggatacctcttactagacttgcaggggttgcttgggtgttgaggaatgacagaggcaatgtcttgatgcacagtagaagagccttctccaatatttcctcctttttggaggctcaatttctaagcattgtttgggctgttgagagtatggttagtcatcatgtgaatagggtggtttttggtgtggaagctgcggtgcttgttggggtgttaaacaggccgcaagcttggccttcttttaggtttcagtcttcggagatcttgttagctttaaatggcattgcagtttggaaagtggtgcttgaatcggtgtcttcgaatagaggtgctaatctcattgcccaaagtgttactaaggagtgtaggcttcaatcgtacgtggccgtaagttttcctgcttggcttcttggtgtctttagggatgagagagttctaacctctgtggactgaagtctttttgcttttaggctccttgctttttgggaggcttattcttttgttgccctgttaatttttggattctcagggttgaccttttagtgggtgtttcttgtgccccttgatctcattttttggtctgactttctgcaagtcagttgtaattgtgctaatatctaatataacaagtaatctacctttgcgacaaaaaaaaggatacctcttactattgcagtaagaggatactaattatcaaattcattagaatcatactctcaacaaatccaaactgtcacataaataaaatagtattcatcagttcaaaaacaaagtttagtattcattataattctgtttttaacaatgaaatatcaatatataatagtctcaacatcgcacactgtacgtgaaaatagcttctcatctatatcatgtcttattgtgagagtgtagtaggtatggtataatgactatgcttggaaaaactaagaacggtatgaccgcaataaatgatcattcattgatacttttagtacaacacaataaataatccttttttgtatcatcttgaaataatatagtatatgccaaatttattgtttaaaagtgtagttcttaggattaagacatgcaatctaaaattagttggtactaataatcgttgataatcactacttggttttaatttgagaatgcatgttgttgacatataaatgtgtagttgagaatacatgcttctggttaaaaaggcattagaccttttggtttgggagaacctacaaagggtatatatagttaatccggaaagaagagatcagaaatattttcaagttttcaacagtcacgtttcgacataaattttggtcaagaacattgacaaagattttgtgtactggtgtaacttttcatccacacagactacttttctatattattttaggcattttctgacttgaacgtcgaaaagttttcgaaaaaacacaagttacaacaatgttacgacagtttagattgataacttaaggaatgtgagctaggtgtacgatcatctatagcaataagcaaaagtgagagatttctttaacaaaaaaaaagtgagagattttcgacattggacatgtgattgcgaatagaattaagacacgaagattttttcttttgccaacagacatgtggatcaaagatgagacgtagcatagaggattgctacttgatcgatggaagagaaatgtgtattcagactcaaactctcgacaccacagatgactcgacaagacagcagtagtcgaatctaatttaaaaggtattcgatttgacccttacttttctctattattcttttcttgaaggcatcttattttcgtttcagtcaatcctttatatacttttccaccatccactgattaataaaaagaaagtagaatctattagtttcatctctttggatacgcaaatgtgctagaatctattaacgagcactataattcataatttatctagccagttattttgaaactcttaagatattttggttcattatggtttaatcttgtttaaaccgattaaaaccgattaccatgcaatattataacgatcagttgtatgtaaaactcaacccgattactgtaaattcaaaataaatgacatgattttatgtgtttacataattatgaatatatttaacgtttgagccattcatattgcatgatgttaatctattgcaatttatgcagaattcatctcaaaatattaagtttatagcttcaaactagtagagatattttctatggtgaatttgtgactgcatatatccttctgaggttaacatatcatgtgaatgttgaacttacaagaaaagacacaaaatgtgaaaactagttgtctttataaggattgcaaaccctttgtgtcaattgtcaaaagataacgcagatgttttatctttctaaaagtagcctgttttatattgaaatctaatgactttttttaatgaatacttgagtgtgaaggctccagcgattacggatgaaaagtgaatgtttcaaaagtatgtggatcaacatgtaattatgttagaattttgtatatatatattccaagaacatattgtcctgacatgcgtcaagtacttagtgatttagaattaatatggaaaataaaatgacgcaacgatgattatgtttagtagagactagagagaggtggaacttttgggtgatgtcgttgtcgtcttcgtgacaccaccacgacaatgtttgtggtaactggtcaattatggtgacctacttttttgtatgtttttcctaacgagtcaaaacccgatattaacacattcctctaaaaacaactgatattattaagctttcggctttgattagaagcatatttagaaatggttttcgacgtgaatatccttatcgtttatttatcataccgatggataaaacgaatagttgcatgaaacacttggtctaaataaacatacggttatagttttaacaaagtggttgtaaagacaaatggtttacaacaacacttggcttttacaacaaatggtttacaaaaacaaatggtttacaacaaatggtcattggtctagtagttttgtattttcatttgagaagaattgtcgctggagactagtgatcaactcctctcaaacacaaaattatcaaaatcattccatttagtcagtcgaaatggtatcacgatccattagaaaattcagttagttagatattcgactcagttataaaaaatccagtaaaaacggcttacatacttgttataaaaaaacccctcttttttttggagaaatatagaaaatattttaaattttcaaatgagtgaaaatattttaatctttgaaattagcagtattttttgctactaatgcatactgatatgtatggaatattaaacacagctaggaaaaaagtgaatgaacctatgttgaaaacatttacctctgagctataatggtcagtaagaaattaagagttattctctcacggattcacagtacacccattataacaaaagactagtcttctctgaccttcttttgttgccacaagaaaaaaaaaggtttcgtcaaaaaatttcaatttcatgatgatgaaattgaggaattacctgaataaattgtataaagaaagcattatgattttgatattttctcaccataaaaccaatactgtaaaaatgatacaagttgttctggataaaagggtccacattaaatttaaaaagcccactaagaagtccaataacaactccagcgtatgttagcattggatcgtcaaacataaacatttcctttcttcaactactactctgttttcacttttcgatttgagaaaaaaaaaaacgatcacgaagatggcgaaagcaagctttattctactcggaactctcttcctcttcggagccatagcttcaattcaggtaacttcattcatatcctctcgaatctatatctgttcaaatgtttcgttaccacaaacgatacattagatctacatcaacattctaatggaagtcaccagattgcttaagcttctagtgttatacttcaggaattaagaactatgtgactattatgagagagttcaaatctctgtttgttaaaattcaggcaaaagaagatctcaaggaggttactcacaaggtttacttcgatgtagagatcgacggcaaatccgctggtatgattcgatgattttagtcaaaatgtttgttcattaagcttacagatttgttaaaatggattgttgctcagatacagctgatgattcttggtttgttttgatgtttgattgattctctggttatgattatgtcgcaggtcgcgttgttataggactatttggcaaggcagttcctaaaactgcaggtacaattatatggtttttgaagtttttgatcatggttctggactattttagtgtgtgctttatatctaagagagtaattcgtgagtgtgtttgcttctttgcagaaaacttcagagctttgtgcacaggtaatctactaactatattcttatagtttcactatataaactttacattatgcacaatctcgaaacaatattacaagccggacaatgagagtgctagtatttgttttcattaacatttgtttcgagatctaatgaaattattacggagttataatggagataagatgcattttatttaatcttttcggaaccggtttgtgttacaatgtttaaatttggcaggggagaaaggtgtagggaagagtgggaaacctctacactacaagggaagcaagttccatcgaatcattcccagctttatgatccagggaggtgacttcacgcatgggaacggtatgggtggagaatcaatctatggtcagaagtttgctgatgagaacttcaagctgaagcacactggaccaggttggtgatcattattttccttgaagcaaagttttggcaagtatttagaaatgtctgatggttgacaatgtgattggatacaggtgtactttcaatggcgaactcgggagaagacacaaatggttcgcagttttttatcacaacggtgacaacaagctggttagatggaaggcatgtggtgtttgggaaagtggtgcaaggaatggatgtagtttataagattgaagctgagggcaaacaaagcggaactcctaagagcaaagtcgtaattgcagacagtggagaacttcctctctaagaatagcattttaaagttactcttacgagttagttgtaatctaaacacgtcccaaatgctacaagaacagaatggtgtcactggactctgaaatttcgttttcttgcgtaacagacttttccatgaaaatagtactcggcctttcctgtttttagatacgccatggaaactctatggagtagctgctgtatcagcacgaatatcttcatcccatgctgctttgctctgtagatgaagaagctaatctaattactagtaaaacggaaaaccagtaaattgcagcaagcacgtcttggtcatggtgacacgaaatctctgtggtaatatagaagataatctaattactagtaaaacggaaaaccagtaaattggccaaaaatatcaaatagaaccagtgaaaaccagtgaaaaccagtgataacatatgcttccatcttctctagaaatttaggaatttgactgaaactgcaattggcttgtagcccaagttaattttcaatgaattccttcaccatgccatggaacattgttttgatgtatctatcacgtaacctttgcggtcaaagcagtaggtttcacggcatccggtgatcggtggaagcattatagggttcatgacatccggtactggcctaacaacgccttgtgcccatggagacctattgcagtaaactatttatgatgtgtgaggaacctagtggggctcatctaagactcttacccactcattgctcattatgatggaatggatcatcaattcatcatgatctatattcaatacttagctatagaactgaccagagccatctaaaagctatttcaatccataaaagcttttagaaaatgtagtatcaaaaaaatcatgaaactagtgaatgagatcatgcagaatcaaaacaaaaacagaggagctgaatacagaagcataaaataccttagagaacacgtaatagactagtgcaaatatcctaatccttgtaatcatatacaaactccatgacactcctaatcgcgcttaagaaccggtggtggtagttgtggtgtcgccgtccttggtcgtcctccgccgctgatcgaattttttggcgaaattgagagataaatcagagtaaatctccataacttgagagatattaccgttgatttcgttgatcaagccaacgtttctagagacgttatctgggattcgagacatgtggttttcgttgacgcgttgaatcaaatcacgattctgatcaagataaagctgtgcacgtttgaatccattactcaacgtatcccacacctccacgtcttccaccgctgccgaagccgcaacatcttcgccgtcgttttcgttcatctccggagatcggttgtttccgacgagcgatcgatttctcgatgcttccattattttacaaatacatcaaaattattcattcattgttgacgacgcgattggaattgtttgtttctaaagatatctttgggaggaagagagatgaattggggtgacacgtggaagaaaccgacccggaaagcggttggtcgggtcaagaagatgacggtgacggggttgcgtgatggaccaatgggtgttgaaagaagacgtcgttggaaggttatttagaaattattacattatttttattttatatgagaaattagtctttatgaaacaaagattacgaacaaaaatctaacaatatcaaacgacagcaattgaactataaccctaaagagagcaaaacaaaatcaatattcagtgtacaaaactataaacattaaaattattgatggatttgctactaactcaaccgcaactgttataccaatgcatatctcaaagtatcaagttctacgagctcgagtctcatcacttcttccacaaattcttaacaaaacaagaaaatatatctttagtgaaacttatacatatcgaaaccaaatgaggtcaaacttatatttattttttttgggcaacaaaaaaaaaagaaaaagaaaataaaaaaataagtttgacctcatttggtttcgatatgtataagtttcattaaagatatattttcttggtttgctctcttgaggtcaaacttattcatactgacctttttctgttcttttctgatctctttaggaagacgaagcctagccgaaaactaaaatgaaaatgcataagtgaaacaagaaaaagtgtttccatggagtgtgtgtgtgtgaagagatcttcgatgggtctctctttatatatattcaaggaacaaaatgggttagttgaagaaagattttaggtaacattttattttttacttatcagagagtttttttctctcatttgatttgcgtgaatcggtgttaggtcgtcgtttaggagagtgtgttcactttggtacatccacaaaaactgttccaaaatacacaaccaattaaaccacaaaacattattttattttacatgagaaattaatctttatgaaagaaaggttacgaacaaaaaaccccaacaatatcgaacgacagcaattgatctataaaccctaaacacggaaaaaacagaatcaaccacacatccagtgtacaaaactataaaaccctaattagagcaaaacagaatcttatattttaggtttgtttttttcgtcaatgtccacaaaaactaactttaaaaagaatcataactactcttaaaacggaacaccagtgaaaaaggccaaaaatatcaaagttagtcccacaggactttttttatcttctctggaagttgaggtatttgactgaaagtgcaaatgctgagaagaagagagcacaaaaaccgacaagaacagcagcagatacaccaatcatgtttggcttgtagccgaagtaatattcaataaactccttcaccgtgccatgaaacaatggctcgttgatcatgctttccacgtcaccaagctgcgaaaggattactccttgtagtgtccacgccactggacatatgtaatagaaccatatccaccacactggaatcaactgaattaccaaaacaaacacaaagggttaaagattataagggttcaaaatgtggtaaggctgattagtcaagaatcaaatttagtaacaataatccatcaatacttagttctcgattgttcgaatgcataactatattagctacctctcatagagtgatattaaatacttacaggcttttggacgaggaaaccggataggagattccagagagagtaaaacgcagaggagatcacagcggctaaatgctgattcggggtgagaccaaccgccatcatgccatagaaggtgaagtaggtgaatgtgaggaacatgaacaccaaatacagtacaaacttactgaacgttctttcaaagccaatggtgaagtatgtgatgacaccgtagagaatggtttgggtcagaatgtaaggtatctccacaagaccctgagctgctgcatatggaattggagcatacataccagcggctttctctctgtagaaaactgttctttcgattgaaacgattggttgtactgatgaagcgttactaactccaagaaacagacaagccgagtagagagctcccattacggtgatcaaatcctgtgaggaagtcctcttggaaccaatgtcccagaaaactgttcccagtataaacgcagcgatcgttgtgaagactaatctcacgagattgtattctggacttctccagtagacaaggttctgtttccagagacagagtagaaattgagatagttggttttgtgagtatcttgatgtaaagcttattggttctgagccttctggtggaacactgagttgcttgatgtttgcctctacttctctgtttaaaatacacagtatatggtttgatttatgtttttgaaaatgtagctttaaggattgtgatagttacctaaactggtcagatttcttgtataaatctgcaaactccatgttatatttctcttccaaagcaggtgtagttacttcaagcatccaagttgctggattgtaaccacttgagattggaggtactccgttaatcccctgtagagggtttagggtttgtcatatttaacgtggtgcacaagtatgtaagtgcgaagatcaaaacagaataggaaaaggcagggacaagtaagtacctgaaagtaatctaccagaacctgcgagtgtgtacccaatttcccaccatatataacctgtcctcctcgtttcattagaagcagctgtatttttaaggttaagcaaaaaaaaaaaggtacagacgttattaagatcatcgactgataacaattcataactattcttgtaatccaagcaaaattaggtcaaacctcgtcaaaggcctcaaaaatgtcaatgctaggttgatgaatggtgcaaaccactgttcttccagtatcaacagtgtttctaacagttctcatcacaattgctgctgctcttgcatcaagtccagatgttggttcatccatgaaaataattgatggatttgctactaactcaaccgcaattgttagacgtttcctctgctcagtagaaagacccgtggtaccaggtaaacctactaaagcatatctcagagtgtcaagctctacaagtctcatgacttgttccacaaattcctaacaaaacaagaaaatatatgttagtgaaacaatccatattcggaaccaaatgaggtaaaactcattcatactgacctttttctgttctttggtgatctccttaggaagacgaaggctagccgaaaaccataaggactcttcaactgtgacttgaggagagtgtatatcgttctgctcaacatatccagagatcctagcaaacgtttgttgttcttttgggtgaccagagattctaatatctccctcggtatatccacctgtctttcgacccgcaagaacatccatcaacgtagtttttcccgcaccgcttgatccaactaaagctgtaagaactccaggtgagaacactccactcacgtttgataacagttgtagtcttgtctctggtacaccttgagaacgcatttcctgagatttcccgaacaaacaaactttaatgcaaccatagataaaggctgatactaccaaagcaaaacagagaagtgaaattaacctttggcatgtcaacataatagttgacattgtggaaagtcattgttaatggtttgaatggaaggatcattccctttttctcacttattacttgatttgcatctgctactaaagcagtttcttcattgggatcgtctaaaacaactgctcgagcttttcttagagctgcaagagaaaaaacaaaagagctaagcttcacaatattatactacagatatctagacgaaagaaccattagcaatagagactctcacggttaagataagccaaggcgagagttactacgttattgaatagaattgcataaccaatgagaaccgcgattccaatccaataccaatagtcattcgttggaaagctacgtagctttagaaggttgagtccaattgtagtatcagatatagctgatggctgcatgatgtttaaaagtatatagttaagcattgcatgcatattctaacaaagtaatattaactcaacaaaaagattaatgaacacaccgtcatccaccgtgtggctgtgaattcattgaccgcaatggcacgttgtccataggataacggcgacacccaaaaaccccaaacccaccaaggtttaatatcagctgtaagaaatgataaggttttattttagcaacactaaccaacaaataaatttcttttatacaagaaatagtgaagtagtagtaataactaaccttttggaataacgaatccaccaagcaagaacactattaagattgctgcagatccgaatgtattggcaatgaccatgtcccttgctagagaagccatcatacgaaataaaccgagagccatttgatgcaccgagaagagaagtaacatgtatcggaaaaatctaggagaacaaaaagagatttattgtaagactacaaaactaaaaatcaacaagaagtttagaaataataatatcaagataaataaccaacctgcctgctgagggagcaagtcccacagtgaagtatactacaccactccagacaacagcttcaaggacagagtaaggcacacgcaagagccagctggcaatagaccatgaccaagcaggatgaaaggagttatccctttgcttgtaaaaaaccgggagacgcgatatcatgagaggtagttcagagaaaccgttgaacatcatgtggactagcccgaagaaaaggcaagatagatactcattgccaaattgttcgcttgttgggtgtaatctagttttcaagaacactgtcgctgtgacaagtcccacaaatccaacctttatggaacacaaaatgttttagatcagaatcttagaattttatctaaggacatttgaataatatctacgtcaagatgtcactatagtgatgcaaattgtatcacataatggtgcatatatataagaataagactaattttagaaaagcagaattgaagcaagcgcaaatgaagacctaggcttatggtatagacaaaatttattggttacttgattcaaaagccacacaaaaccaatgtcatggaaacaaacctaagtgtcaatactctagatgatgccaaatttacaaatgcagcaaaaagatgtagatatttacctggcatgtcctaaaagtgtaaagaaatttgtgccgtttgatcaataataattctcgtacaaagcaaactttaaggttttcccatcctgaaatggcaaattttgttctgcataaagctgaaggatccgcagatttcttgtcaaatggtgcagccagcttggaatccgcagcatgcccgtatttcgagttacggaatgcagccgctatgtctgagacaggaatgaactgatatggcttcgaaggatctgcccagtattgagcttgatcctttttagaggtcacctgcataccaacattataatagattgagtttgagtatactaaaactcaaattaaagaacagagtttagatatatacctcttggagaaaatctgccacacctttacgcggtgggagacggaatcctagagactcaaaaaaggctatcacatcttctcgaggaccttgatataccatgtaaccttctgatagaagaattaagtcatcaaacaagtcaaatgtttctggtgcaggctgaagaagtgccataagaacagttgcatccattagatgaacgaagtttctgatacatttgacaatctggaaagttgttgaactatcaagaccagtagatatttcatccataaacaacgtttttcttggcccaacagtcatttctcctgcattgtgtcaaatttatcaattagcaaaacagagctggtgtataattctaagtgagatagataagtaaacagagtgagaaaagacctgttgtaactcttttcctttgacctcctgaaacacctctcatcatatcattaccaaccattgtatcagaacatacatcaagaccaagtactttaagcacataatctgtcgaaacactatgcttttcgcctttgacagaagcagcctaataacagagagcatgtgtcaaaactttgttgtgtgatcaagaaacatgagagattattgagctatatgatactaaccttcataaacgcatcaatctcagaagaaggacgtatacccctctctttctctaatcgggttagatctttcatgtaacctacaattacacaacatcaaaacagaaaatatttgagaatctatgacttgatgaagaagtttacatagtgagtagtaacatcaaataagaaaaaacctgcaaatccttcgcttgcgccttgacatctcgcagcgaaatcaagagtttcacgaacagtgagttcagcaatgtgattatctgtttgacttatatatgctgaagttcttttaacatgaaacttgttaagattctctccattataggtaatgttacccgttttctgtcatagatgcaaaaaacaaaaaggacacatgcatgtgagtacgtgacttttaaaacgaaatgagataacaaacataagttacatgtgatatagatgaacatagttaataacttcacggatcaactaacctttaaactcttatcaagcttccctgcaagagcaagaagcaacgtcgattttccggaacccggtggtcctaacaacaaagtcatccttcaaaagtagcaaaaaacattagtacttgtgatcatacatatgacatagcgataatctaaaaacagtcttttaattcaccttcctggtttgataatcccactaatatctttcaaaatattaagcttgtgtttcctaggcttgattatcctcaagctgcttaagcaacgctgcaacaaacagagattagatacaatcatcaaaaaaagattgtgttagaatactcacaagataaaacaaagaagacaaacctcaaagaaatcacgagagacattaaccaaagtaggcaaagctcttgtaccagcttgaacatcagcttcaatattcaaattctcgaaccgcacttcgattttcggaacctccataccaactctacgaacaaaatttgtatcaaattcaaacgagccatatatatatatataaaatttactttttctccctaaaattagaaacagagagaattcgaagagtcgtaacaaaccgatcaagacgttctttaatagcagagagaagcttgaaattatcttgatcactagtagcaagagcttgacgaaccaacatctcacgatccgcacgatccaatttcttcacatcaatcgtttgaaccacgtttccatcagcgtaaccagaagtctgcgtttgcgtttgcgaccgacgcagaatcgcattatgagtcccttgtctctgcgacggtaatcttccgatcgccgcccaccgtagatcttcctcatcttgctccactgtctcggcgttagacggccgcgcgaacgattctcttcctgtttctacatcgaattcgaaatactcactcccattcgaagccgccgccattgtttaaccacgacgagaagatcgaaatcgaaatcgagaattttcagatttgagatttgttcttatctctccgattttgagtttttttttcctctgctccgaaaaatcagagaaggggaattttattttttgggctctctgttagactgattcagtttaggtgtctacgctgcatataaaagcgtgcatatatcccgggcatatttgaaggtaatgtaaatgactatattacccctgatttttttgctactgaaaggactatagtatccttattgttttgtgttatggttttggtgagtgagggtataaaaggagtttgagtttgagttcgttttgtcctgttcttactctaagtttgttttcttctagaaggtttttttttttaccttgaaagataatttggtagtaattttactatttttaatcgaatttgtatttgaattctggtgataataagatacttatttaagtagttgatgatttttatttaatgcagtcaacttaaatatttttttttctatttagtgttttgatattactttaggacaaataagggaaagaagaaaaacaaagcttgtggagtgtttttgggaaattgataccaaattgatactcaaaaaagatttaacgaaatgttgaacttgaaattacttgaggacaaaggtgaaagaaaaaacagcaaagcttctaaagagatttaacaaatgtgttgttcatattccactagtgcgttttattactgttaaaatttaatttgtaaaccaataaaaaaaaaaacgaaaaggaacttgactataaaacggtgatggcttgtagaactggaaaaatcttctggaagcaaatgtttctgtgacctgtaatttccaaagataggattgttttagtgtctagaaatagtattcgtgttgggctgtattattcgcatttttccgatgaaggtataaataggtagattacgtggtttgtttttcttgttaaaatttgggaaaattattattgcatgttgtttggtatggtttgtgtgaattagtttatttttcatgatttttccattagtagatgtccattgcctttatataaccataccaattacttttataattgctatccaactcatattatagatagacacgaaattgttatttctttttttttttagtcgagatagacacgaaattgaagaggtttacattcattcgtacgtaatcgtaacattatcgtttactgataaattcggcaatattttctggaataatctcgttaaaatatattgtcttaaaatataatataaaaacttcacgctttgatgtaataaattctatatcgcttgaagttatcctaacaacgtgaatgtacaaacacttattcgaattagtacttttttttttttggtttgttcattgtagtttcatagtttaatttctagtttagcaaaagtggatcttggtgggcttgtaatatctttggtctcatgctttttatattaaaaacccattatcaaaaaacaatagttttatagaaaaattaatcaagactctatattaagcttagcatttagcaaaaccccaagctgcagttgaggacaatgatggatattcgacggaaacagttggccgtagaaaatcgacgagagatttggatcctttttagggttttgccgtgtaaaaaaaggaaactgtcaacttataaatagctgcgttctcgctcttccactctctcaaattccttgctcatcaagcttcttcttcgattctcctgtcagactcgtcgtgcttgcggattcctcctttggtttcctttccgatcgtaagtttacttctactacatgtctacatctttatcttcgaccacaatctacatcgtcttgaacttgaagtaatcttgcatgtcctaggctcctagctttagaggatttttctttgatgttttcgttcaattctgttgatttcactgtctaggtttctccttttgatttaaactatctgaacttgtaaccctaaccctagatcggattttgttgttgatagattctttataatcctaacctatatatgtctaccaaaagagtagatatgggttctagagattatattagcagtctaccagatgagattcttggcaaaatcttatcattgttttgcacaaatcgtgctgcttgcacatcagttctgtccaaaaggtggaggaatctgctcgagcttgtagacaaccttgatttgaatgacgcatatggtaatcatcaatacttctgtgattttgtggacagaacacttgctctcttaagcaattctaccaccgtcaagagattctccctaaattgtgcatttcacaatgacgcttctcgggtgaacagttggatacgcactgtcttcgatcgcggcttcttggatcttcacttggagaccgcacatatgcatcgtatagacactgagttcttcacgagcaatacacttcttgagctcacaatatgcggtgggttttatgctgagggtcgtcttcctcctgggagagtgttttttccagcgcttaaatcactctctctagtttcagtggagtttacagatactttgatgtatcagaatttcatctctggctgccctgtgcttgaggaattattcctacattatgataatgagacacaatgcccggcttggaaagggctcgtatcgagtccttccatcaaacggctgaacatctatgacaatccttccgagttacgttatgaggcttacaaatgttgctttcagatacccagccttgtgtaccttgactattctagttatgtggcgaaacagtatgcggttgatctggtttcccttgaagaagctagactcaatatccgatatccggagagacttgtagatcagaatgaggatatttttggtgatgttacggatttgcttaaagggataagcaatgttaaaacccttcatttatcttctgattctcttgaggtcagttttgctacctattcttcttctatgattgtttcaatttgaagtgtatgctagctagcaaggtctcattttgtattatatgtctgttttggttatgactacaaatccaggtgtttcacttgtgctgtgatacaatgccggtgtttcataacctccttactttatcttttgagagtgacgaagaaataggctggcaagtggtgccacttctcctcaacaaatctccaaacctagaaactttagtcatcaaggtatcatcaatttcgttcgatcaacaccacacaattcgcttttcctagattactattgtaaatgaatttgcttgtgccgtacgtattatcttctttgcctagctttaatgtttttaattgaattccttttgctttcagagtcttgtgcaccaagtaacagatatgtgcgggaacgcctgcgcttgcatctctaagaggaggaagaaaaagaagaagacgacggaggatgacgaatgttgtttatctacatgtcaagtcaaagtgctaaatatttcagggtatcgaggtacttgtaaagagctgaaacaaatgaggcatttcttggagaatttgaaatgtcttgaaactgtcaatgtgggtgttgatgtgaagcgcagagaatataagaatggtaataacaagtaccagaggatcaccaatgctgttatggagcttcctagattttcatcaaactgtcagatccaattcttctgatttctcatttgaaaactgaatcattaacatgccaaaactaaatcttttagaagataaactttttttctctacgaaggtaatcaatattttgctatttatttagggaaagcataaagagaaagtggtcactaatgagaattctcatctagtgatcaactctttgtgttattttttttgcttattaaagtctttgttattatgagaataaggagaaagttgtcctcctagtttgaagagcactgccattttaattgctgtttccttcttctttgttgtctatataaactagtaaaggcaaatgaacaaaggcagagagaattttgtcataaaacagtttgtttttgttcattttaagcttaatctcctctttacgctccatttgatagagttcccacttcatttatataattaattagatctgtattgctgttgctgaaacatatgttgttcagttttgtcttttctactgaattaaacagcaagttcttaattacttaagatacaaaacctaaaagtcagattattgtggttgaagctatgaaccaaattctacgcaaagtactcaaataaagagaagtaagagaaaaacaactttcaaacctgatttcattggtggaagattaatgcataaatgagagagccaaaatggacttcagatagattttctaaacaaaattaacttattttcttaagctaaatggttaagctctctctctaacaaacactttcaattaaatattgacgttctaatttttcaaattgtatatttgaaataaaaaatattactttcgttgtaatttaaaagttttagaaaccacaacattaaaatttcatatgataatatttaataactatcatcaaacatataattttttttaccaaaatataaaaaatgatgtaaatgaaaaagtgatacattagtacttttacattactaaaaataaaaataattatatagtagtacttttgcattatagattatttttaataatttcaactaaactaaaaataaaaataaaagaacatttctgttaaaaaaagataaaaaaaagttatataataatactttgcattaaaaatttattaccaaaaagatcaccaagcacagcagatcaaggtcaaactcagaatctggaagcagcagctcaaagtcataactttggtgaagtggcagcagttcaaagtcaaactcagaatccgggagcagcagttcaaggtcatgatcttggtgaagtggcagcagctcaaggtcaaaatcagaatccgtgagcagcagttcaagatcatgatcttggtgaagtagcagcagctcaaggtcaagatcagaatctgtgagcagcagttcaagatcatgatcttggtgaagtagcaggagctcaaagtcaagatcagaatctgggtccgagtgctgcagtaataacattagagtcttaccgtactatagataaatagtatcaagattcgagaaacaatgaaataagataaatttctatttgataaattatattgttatgcacaaataatggaaattgcccaatttatatgtggatgatatataaaaaatattactcacaacacaaaaggtgcaaaccatgtacgattttagacatatatctgcatcacttgttgtccgaagataatcaagttgttgccatgtgatttcctacacaacaaatcagacataagagtctcatcatacatacgtagataagataacaccaagaaggttcatttttttgacataaaagttatatcatctctcaccccggtaactatataaagtcctatttgctggtttaattttctcacaagaagaaaccaatggaaggaactgttatcacagacgatgtaatggcctgggaaaaagaaacaggattaagtcgttgcttcaaaaacagagaatttgtagataattactgtgttgttgattcgcacttttgtttttgttttttggctttgccataacaggagcaatgaagactgcaaggtctcctttctatagagaaaagtatggttcaaagtctgtagagaagaatcaactgggacaaaatcttatcacagactataggactggtgtttagtgccttatcacagactatgtgactggtgtttggtggtgaatattatagcgattgtctagtggcaaatattatagcgtatttttagtggcaaatattatagcttcttttctagggtgtttagataagctacattacatgttgtgagctgaaacttgtagtgtgattctttttgctgcttccattgctaattttgtacatattttggtttgagtggctcacttcactctacatgccaattttataagaggcttcgtttaggtataatacagtttggttggttatagcatgaatgataacatgttatgctcaaccggcgaccaaattatcttgcttctttttaaccctcgttgattacacattatcaacatttcggccattataacaatagaccgaaatgacctggtagccattctcgcttggcccactaatttttgcctagaacaaaagattgagcactaaaagatttaggaaattgatcaaagtaaaaaaaaaagtgaaaaacaaaaagaagttgcatcacattctcaaaatcttttggaaatagattttggattttgtttaaaaatttgtaaaagccatcaaaaactgagttttctatttttttaggatccttgattggccttgaatgttttactagtttttgtttttaaaaaactcattttttactcattcaagattttggaaaagttggttctagttttgggaagattttaacaatcttcattgacaatctaaattccattttatttgacttttcacttttcctaaacaaaattcttaacttgacaattgtatattttttatttctttattttgtaaaatccaataactaaaaactataggttttagaagagtttttggtttttgttttttcaaaaactattaatatgtcgaaccagtcaagtttataaaatttggtgtccctaaaatttaggaaaatacgtttgcattatttaaaattcaaaatttgaccttatttatattattttttctcaaaaatcaaaatctaaaatcgaaaaactagaaaccaattccaaagactgacttacaaaacagcatccacccattcatggaaaagaacccaccaccacaactattaaattggaaaaggaaaaaaatatattaaaatggtttttttggaaaatcaaaaactataaaccatgttagaatccagggattatcgattgttgagaaaaacaaaaaaaggtgacatcgctatcttattattatatataagagaggaaaaaaaaaaaaaaatggagttctcgttgtccgactctctctctcttgagaaatccattgtcgtcgtcacccaaaaagtaagctgtttctttgatcttcctgttcacccaaaagcaagcttcttctttcacatcccttcttttgcgtttcgtttccagtcgtaagttaacgtttaattttcttattaaaatctcaaatcatcaccaatttgatcaattagatctgttgattttacctgtctgaacttaatttgggttctaataatcgattttttttttgattctccttgtataggttctatatatgggttccagagatttaattagcagtctgccagatgaaattcttggcaaagtcctgtctttgcttccgacaaaacgtgctgcttccacagctgttctgtctaaaaggtggaacaatctgcctgctcttgtagacaagcttgatatcaatgacgcaattggtggtcctggaggcttccctgaattc

SEQ ID NO: 308 - DNA, 83796 bp, Arabidopsis thaliana
aagcttccatagctatgcaacctcttcaaggtttcaaaatcactccccagaatccaatggtcatctctttcgccaagaaatgataagagtcttgtttttgtttgtttgttgtcctttaagacgatagtactggaccaaccaaacctggtgtgtataaccaaccaacggttctattggttaacggattaatccggttttggtttaatcattgaaagagacccttgaaacgcggtttcacacttgacgatttatcacaaattaggagacgactcatcaaaaaagaatatcttactggtcaaccattttatagaaatattaaaatcaaaaatgatatttaggccaaagtagaaaaagacaagaagagagagaaacaaaaaaaaccttgctcaatacgccaccgtcgtcgtctttaacccaatctaaaagcctctgttcttttttagttttatcctctttttcatttcaagatcaatttcataaaaaagtttccttttttagcgaatcctctgttttagaaatcttaaagttgtctcctttattaaagaccatcatgtcttccacttctttcaccgaccttcttggttcttccggcgttgactgttacgaagatgatgaagacttgagagtttctgggtcgagttttggtgggtactatccagagagaaccgggtctggtttacctaagttcaagacggctcaaccaccacctcttccgatttcacaatcttctcataacttcactttctccgattaccttgattctcctctgcttctcagctcctcacacgtaataaagcttccattttttcttaattttcttctatttattgcagaaatgaaaaaaaaaaagacaatcttttgatctctggcttgtgttttgtcttgtttacttgcagagtttgatatctccaacaacaggaacgtttccattgcaaggctttaatggaacaacaaacaatcactcagattttccctggcagctacaatctcaaccatcaaacgcttcttctgtatgtgtttccttattagcgttttgaaacatcttcacttgctttgtattgatgaatcaaacttagtttcgttttttgttattttccaggctttgcaagaaacatatggtgttcaagatcacgagaagaagcaggagatgattcctaatgagattgcaacacaaaacaacaatcaaagttttggaacagaacgtcagataaagataccagcatacatggtgagtaggaactctaatgatggttatggttggagaaaatacggtcagaaacaagtgaagaagagcgaaaaccctaggagttacttcaagtgtacgtatcctgattgtgtttccaagaagattgttgagacggcttctgatggacagatcactgagatcatttataaaggtggtcataatcatcctaagcctgagttcaccaagagaccatctcaatcttcattaccatcatcggttaatgggaggcgcttgtttaatcctgcttctgttgttagtgaacctcatgatcaatcagagaactcttcgatttcgtttgactatagtgatcttgagcagaaaagttttaaatcagagtatggtgagatagatgaagaggaggaacaacctgagatgaagaggatgtaagtagttttttttaattagtggaagcaaaaggtttcttcttgggttttggaaatgacatgttttgagttttgtgtaacaggaaaagagaaggtgaagatgaagggatgtctatagaagtaagcaaaggagttaaagagccaagagttgtggttcagacaataagtgatattgatgttcttatagatggctttagatggaggaaatatggtcaaaaagttgtcaaaggaaatactaatccaaggttgtttatacaaaacttagtttctcaaattgttaacatgtttcaagtttctaatcctctctttgttgtaacaggagctactacaagtgcacattccaaggttgtggagtgaagaagcaagtggaaagatccgcagcagacgagagagcagttctcactacctatgaaggaagacacaatcacgatatcccaaccgcgctacgtcgctcgtgaaattattgggacttagtcactagtaatatgatttaggctttctaaaaacaaaaaatcttactatggcttatcttttgtgctcattcacagtttgtttatttgtttgttacacagtcaatactttgttttgtacagagtggtgcttagtagtgtttttattattatcttggccttatagaataacctctcttctcatctgtgtgactttaaacacttgagagtccattttatagttcttgtgtattggtcttttgtttgatttatgtacatttttaatattcaaatttgataaagcaataataatggtttgtaacccactttgcttgattggtgcaacacatctagcattctatctccacattgtgtgagttcattttatttattattagaacttagaagtgaaaccaaaaccacaaatttagaatggttgagattatgaggaaagatgatcaaccaaacataataatagaaagaaacaataaatagaaacaacaaatataggctcatctttcttctaccttctctcacatacctctatctctctctctttgatctcaccaaagtcgaagaaccaatctatcttttgtgtatttactgataagaagaagttagccttcatagccacaagtaaaaacagagtcctctgttttcttctctcattctcccttacattttctcatcaaaaatgaaaacataacattgatagtttcccaaacctagtctctctccctctttctactcgctttcttcgttttactgataaggaaaagactatggagctttcgatgtttggcagagaagataccaactcgtcgcagtggggcgaagtgcacggtccattcatgctggaagagattgtgtgccaggcacaaaacatgctgacctcaagaggcattttcatgaaaagtaaccctctcaaatacgcattgcctcttctattgctacaaatgtcagtcatcatcgtcacctctaggcttatcttccgcgtccttcaacctttaaagcaaggaatgatctctgctcaagtcttggtataactttcaaataccgcattcactatctcttattgcgaaaatatacgttttaaaacattttcttgtttgtgtatgtgtagactggtgttgttttaggaccgtctttcttaggacataatgtgatttacatgaacatgtttcttcccgcgggaggcaagatcataatacaaacgctttcaaacgtcggtttcgtcatccatctcttcctcctcggactcaaaatcgatgggagtattatcagaaaagctggttctaaagccattcttattggtacagcctcttacgccttcccgttctctcttgggaacctcacgattatgttcattagtaaaactatgggacttcccagcgacgtgattagttgtacaagcagcgcaatctccttgagctctatgacttcattcccggttacaaccacggtcttagcggaacttaacatccttaactccgagctaggtcgtttagccacccactgctcaatggtctgcgaagtttgtagctggtttgtcgctctcgcttttaatctctacacacgtgaccggacgatgactagtctttacgcgctttccatgatcataggtctccttctggtgatttatttcgtctttagacctataatagtatggctcacccagaggaaaaccaaatccatggataagaaagacgttgtcccgttctttccggtactcttgcttttatctatagctagccttagtggagaggccatgggggtccatgctgcgtttggagcgttttggttaggtgtttcgctccctgatggtccacctttaggcacggaacttgctgcaaaactcgagatgtttgcttcgaatttgttcctcccttgtttcattgccattagtgggttgcaaactaatttctttgagataacagagagccatgagcaccatgtggtaatgattgagataattctcttgatcacttatggatgcaagttccttggaacagcagctgcgtctgcttactgccaaacgcagattggagacgcgctttgtttggccttcttgatgtgttgccaaggtatcattgaagtctacactactatcgtgtggaaagacgctcaggtaaaaataaatagacgttgcttaatttgttttttttagttaggttttggttcacaattagaaatatagaaagagtttttcttcctattcacgtaaacttttcttttaacctaaggtaaaagaaaatttgaatttgggttacaggttgttgatacagaatgctttaatctggtgatcatcacgattttgttcgtaactggtatttcccggttcctcgtggtgtacctctacgacccttcaaaacgttacaaaagcaaaagcaaacgaacaatcctcaacacgagacaacataatcttcagctacgtcttctccttggtctctataatgttgaaaacgttccttccatggttaatcttctagaagctacttacccgacacggtttaacccgatctcattctttacgttgcacctcgtcgagcttaaaggccgagctcatgcactccttacaccacaccatcagatgaacaaacttgaccctaacacggcccagtccacacatattgtcaacgcctttcagcgttttgagcaaaagtaccaggtaaaacagctctggtctccggcttgaggggatgtatgggtctaggcctataacctcatataagagatcaataacgttttcaattgttcaagcataatttttgcatctgcatttgtagattgataataatggatacttatcttatgttagggagctctcatggcgcaacactttaccgcagccgcgccttactcgagtataaacaacgacatatgcacgctggccctcgacaagaaagcgacgttaatcgtgattccgttccacaagcagtacgcgattgacgggacggtcggacaagtcaacgggcccatccggaccataaaccttaacgtgttggacgcggcaccttgttcggtggcaatattcatagaccgaggagagaccgagggacgtcggtccgtgttgatgaccaatacgtggcagaacgttgcgatgctcttcatcggtggcaaggatgatgcggaagcgctcgcgttatgcatgaggatggctgaaaaaccagaccttaacgttacgatgatacatttccgtcacaagagcgctcttcaagacgaagattacagcgacatgtctgagtacaatctcatcagtgatttcaagagctatgcagcgaacaaagggaaaattcactacgtagaggagatagtgagagatggcgtggagactacgcaagtgattagctcacttggagatgcctatgacatggtgttagtgggtcgagaccatgacctagagtcttcggtcttgtacggactcacggactggagtgagtgccctgagttaggtgtgatcggagatatgttgacgtcgccggattttcatttctccgtacttgtcgttcatcagcagcaaggagacgacttactggccatggacgatagttataaattgcctaacgtcgagcatcagaagattggtgatactggaatacaacaacgtttctctgctgaagaaggtttcactaccattgatctcggtaaacgctagaggaaccaagtgacttaatcttgatttaattagtaacattcattttttaatcataagttcataactagagatatttatacatagatgtatctaagaggtagatgcatttaggatcttgagttgagtctcaggatgtcatcatgttgttatagtgtagtagttttttttctttcatttatatattaataagagatcaacgtagtaagcaattttttggggtgaagggttttatgtgttggagaaccagaactatgtgacatatatattatcattcatatagattgaagactgcatctgactccattatgaactatatctctagtcctaagaacaaatgagatgcttaataatcacttctaggacatatgtatcaaatgtcactacgtacatcaaagaaaaagtaactcttaaaacaattgaaattcgatctttgtagtttttcaatatgtggatattttcaccaattctctatctccaacaaccttggcttgaggagaatataagacatatgaaaaagaagaagaaaaaaacccagcttcataaacatatataacaactagaaacaaaacacaacaagggccaaaaagagaaagacgatggacttttggacgtatatcaaaatacgaagtcccgtttgtatccaaacacagatatcagatatgtgacataagccaaaaatgtgcaaatcaaattcgtacttggtaaccgatttgctgcttttcattggaaatgtatcgtgtttcaattgtataattttttggttataagaaaccttttgaaatcatccatttaattacaacgtagatacttatccaaattttaaattttggttttcttcctttcttgaagttatcatttacatgtctggtctaataaaaaaaaaaagatgtggtgaacgataagatgggtgtttagaagagatgggacataaaggatgggaatccatgtgaaggcagacgaatcatatgctctcgccagctttcattttcttttctttcttcgttgagatttattaatattgttttccatttcttaacttgtagatgtctccatcatatagcttttaagtttttctcccaataatgttagcaagaaaaacagatttcttcgtaaataattcacattctttcaatcttgctgactctaaatttcagctagaaagaatatattctgaagagcctccattactttgatattgatatatgccgttaccaaattttacagaattgttataaataaaaaaaacattgttatcgatttcttcatgtataatcattgaggcctttatggtatttgtccatatatagtgaatactaccattaactttctttgcactttatatgattgaaaattttaatattatttgaaaacatatggtttgtgtttttcagttccacagacttatcgattggtccacctacatggctacatctgcatgtgacgaccttacatgattgcctgacgtctctacactctttctttggacccttaattaatcagccgtctcgagttcgcattattaccaataaataattaaccaccgaaacttaaaaaactaatctggtctaaatacgttgcattacagttgaacatgcagttcttcttatataaagtatgatttaaattcttctgattttataatgaccacagtttaatgaaagtcatcaacccatttataattgaaaattttcaatttaattctccttaaattccaacctcttccattattatttacttgacctctagctattattcacttgatctcgacccagatgtttcttaaacaaatattgagttagtaatttgttaccatcatcatatgattttaccattttcatatactttggtttagttacattaatttttcttttgcattttggaattctaattgtactacaagatccagtttacatatgagtacaaagttttaattctagataatggtcatatgatcttaacttagaatcttgtcctcactgccacggactgaaattagaacatcaatttaacatagatcttatccacatgagaacagtacatagttttggttttaacttcataataaataaaatatttgaaattttctcaccgggcatgttaaataaaaatccgattccggatccaaaaaaaaaaaaaaaaaaaaaaaaaaaaaaaaaaaagaatttaagaaaatagagacataattaacaaggtgtgaaaaaaagaagaagtactaatttaattaagatcctcagtgatgctatcaaggtgaggccgccacgtggacactgacgccgaccggctatgtttccgacggtgacgattctctttaccggccgaactcatcttctccgacaacataacatcttccaaatatttctcacacaacgtcaaacaatgaccatcaagatccttattagtactcacatgatcactattaatatcgttgccgctttcaagaggctttttccggcatcggagctcttttctcttctttgttttcttcttctccggcatagaagtatccgggataagaaaatagatgcttccacgcttaagctcagattcaggagacaagatcaagatcttacgcacaactccttgagaacaaggtttgcttaagacatggttaggattcgcctgaagaatctcgccggcggtcattggactagtgatctcgtcgacgtggccgttgagatgtacgatacggatcaaatctaaagctccacatggaagtacacaagccaaacaacaccgtaaactgtttcccatatcttcttctttgcaaacagatttctatgttttctttagcaaaataaagattacttatagaatttttttcttttatttggttctttgttgttgttatgtgttgtttttgtggggaagacgaggttatatatatagatagagtgaaccaaaaatgattaaagagagcttgaccaaacgtttacggatattttatttactaaaatgccctttcttcttattgtggatttgtgattaacttaagcagccctccttaatccttattatagtgctcaattgctcatcattgtacaaattacaaaaccatttagttcttttattccactcaattaaatctacgttttaacaataaaatatacccaatgtttggtcaatacttaatcatttttggtcttaaaatctacctgtctaataatttaatttttaataactataagattaattatttgatagaagaaattaatatatgaatatattgtcaaaagactcaaaactaatcagaaagaaagttgcactttataattgtacgatttacaccaaactactaaataatatatccaactattatttttaacatatgtgctttgttttattttttgttaaacaattatatagatgctttatccagtaaagaaattcgttacgaataattaaggaccgtataatatttttattgtattttcaaacagttttagttttaatacgtgaaaactactgcatacacaaatactacatttgctaatttgctacaactgtttttcatcttattcttctacagttatactgtaatgcaattctgcgaaaagacaaaaataacaccagataaaaaatgcttcccaaaacgacaaacaataatgagaataacaattataatctgtcgatgtaatatctaaaagagtaaaacgatacaccttcgtattccttttcgtatctcgaatagtctaaatgctctcaggcaactactagctatggaaggaagcattaactgaatttgtggtccttgattgtaatatttcttaattatggtactttactgctaattgccacatatatatttttctcgttttaaatcaaaaaattaacccgtacgtacccggtaccctatttgtacttaatttcatctaacacttatgctagtatgcaacatggtattaattactatagaaaatagtaagaggagcttattgatatttaaaaagtggagaaatttagccagaggatccgttacgctcgggttatgatacccaaaggagatcaatgtataattaaataacgtaacaagaaagaaattataagtataactatctaaaatcaaatagttaactgatttaattttattgttatctttttcccgaccaatccgggtataatgttcttgtacatagagtatttgaataagatccgatttttaaaaagcactattattatggagataaattaggggtttttactactaaataaataaacaaaaccttactttgattattactattttaaatgaataaactaaaaatattcaaactggaacgaatcaaatttcgatggaatacaacttacaataacattcattagaagacagttttacaacaatcgtttaattatataatataaaaatctatgttttacataaacatcgatcataatagtccaatcaattgaataataaaagaaaaataatggtttgtccaatttttgaaagcctcttgtcacatgtctcatctcgaaaagacaaaagcttaagactgaaactgcaccaatagtactacgtaatattcaacgttaattttatataaacactgttaaaatgagacagaaaaagtaatatgcatgtaccaaatgtacgtaggaatctagttagatcatgattctccatttttcaggattatattaatcagttaattatgattctcgactctcgagacgttaacttccccttaatgacatgaatttaatggtgcttaaggttttggtaaaccccatattcatcaaatgattattgaataaatacatacttaagtacgtatgaggaagcttcgtagcacggagctttcaggcaccgactattttacgtacgaacggcgctgaaattgattgattatgaaactaatgattttaattattttctaatatcaaagaataagcctcgtgtgcaccacaagatatttctttttggtgttcagttatgaacttatgattgaaaattaattaaccatgaaactaaaagacgatcaattaattgaagaacgtgagccaagtctgtcttttccctcaattggacaacacttgtatccacggtggatcataaaccacataattaattatgtagttgaatgaggttagtgaaaaagggttaaattaatcgtttaggacagaactgattgtttgtttgtttctaaattatttatgaaccagtttatgcaagcaaacaattttctatattagaatctgaataatatattttaacgtaggaatcagtcgattggaaataaatattttactatatcaaatacggctgacaatataatgatactctaaaggatactaattttgtatttctgtactcattagaaaaagagttcatttcctaccaaaaagaaaaagaaaaggagttcaactgcaaaattcaaatggaatattttttctttaaaccataaaaaatttactcgctcatcttcatttaaaaatatttctatcttagatatatagtagtatatcgcaaaagtttgagtttacttatataggatatatgctggtgaaactatgatggtccttattatattaaatactaacaagaatcgcaaaactataagtttaatatggttgcttgtctctccctattttttttgtcacaacgctggaatcggaaataaagaaaagatacatagctgtcatttttggtcaaacggttcaatgaatcaaagtctagtttctagttccagttacaaagttcagttttacatttttgttctgaaagattttgagctgtatttgtgaaccatctgaagttatgtacgtatggagagtaaaactaattcttgtaaatatttgcctaagaaaatgaacagcagagtttattttaagtttcaaacgtgttgttactattgtagactctcgaaagattaatatataaccttctagaatttcgtagtcacaaacaaaaatatttgacaggataatgtttaggggggaagaacctgatggtgtaagtataaacgacaaattaagagaataacatatagcttagatcattggagatattccagtcgataatacgcgttgatttagatttatcctcgtgagcaagatccttttttgttctatatgatttagtggtgcacgttgctctctctatcttaaaactagctaagttgacgtgagaggaaaatccaaatgacatttcaagagattttatgaagatgtaggacatataacattaacatcaatcatatataaaaaaaggggtggtcttgaagttgaactactaggttcgtctgagaaagaaactgtcagaaaattgaatgagaccgtaaattcgtatagtttttatgttaaccatttcagatttcattttatgtagggatcaatttttcctcctgagatagtagaagccataaaatataaccaaactgtaaccacatcaacaactgcattaaaaaaaaagttgatatgattatcatccatgattaaatactttttttttcatcaaaccataattaaatacttttataacaaatatgataggaatatgcatagggaagctgtatcatttacataaattcattatggctcttaccgtttcatattgttcttacgttaattacttaatttcaattttctttttacacgaggaaacatgtacagataattgttgttagggccgggcctttatatgttgaaccagcccataaaattttgaaacataattccacaaaattataatgtagcttcgaaatgaaataatacaacccaaatttcttgcgttatatatcgacgatcgtaggcataaactcgtaatagtttttctctccatctccatgtaagcaagtcggtttctgattggttctctctataaaagagtatccttccgattacttaatagaaatgatgttttgacgaaaaaaaatatatatattgacgatcataattttttaataaaagccaacatattacgtttcttgaaaatttcattcatgatttgttgacgttgtgttgttagtatattttgtgcatctttaaactttaaaagccatccaaaaccaaaattaatgaataaattataaatttataaatttaaatatgtcttaaattaaaataaagtaaaattgaagtcaaccaatatggagaagtcaaacacctaattaataagatatttcttgttaaaggaattgaaataaagtgttaaatacgttaaagtggactaaaaaaaaaaagaaaaaaatcttcttttatatggtaatgtatctgtgaaatctcgttaatatctttacgtagactatattcaaagcttctatgtttactccaacagaacatgaacatcaccttcaagctctttaaaacgccatcactaacttaattcaccactatagaggaatcaaaataacaggaagtgatcaaatacacaatgtatatatctaaaaccatagtgtttggtctctttgttgcaacactcctcgtgtcttgcaatgcggatgcaaacaccacgcagccgcttttcccggcgattctaatattcggcgactcaacggcagacacaggcaataacaactactactcacaagccgtcttcaaggctaatcacctcccttatggcgttgatcttcccggccacgaagctaacggaagattctcaaacggaaagctaatctctgacgtaatctccacaaaactcaacatcaaagagtttgttcctccgtttctacaaccgaacatctccgaccaagacattgtcactggagtctgttttgcatccgcgggtgctggctacgatgacgagacctcactatctagcaaagctattccggtctcacaacagccaagcatgttcaagaattatattgctcgtctcaaaggtatcgtaggagacaagaaagcgatggagattattaacaacgctttagtggtcataagcgcagggcctaatgatttcatcttgaacttttacgatatccccataaggcgtctcgagtatcctactatctatggctaccaagattttgttctcaagaggcttgacggttttgtccgggtaaaatcttgaaatttttgttttcatggtctgggaccagattatttcatggagctatatttgtcgtgctgactctcgaatcttttcttcttgtgtgcaggagctttatagtttaggttgccggaatattctagtcggagggttgccgccaatgggatgtttaccgatccaattgaccgcgaaattgagaaccattttgggaatttgtgtggaacaagaaaacaaagactccattttgtacaatcagaagcttgtaaagaaattgcctgagatccaagcgtctctacccggaagcaagttcctttacgctaacgtctacgaccctgtgatggacatgatccgaaaccctagcaaatacggtatatacaattttttcccttgttccacaagtcatctaaatctgaaccttactaacttatgcaatatatactcatcgtcgtacaaataaaaacaggattcaaggagacgaagaaaggatgttgcggaacaggatacttggaaacaagcttcttgtgcacttccttgtcaaagacttgtccgaatcattcggatcacttgttttgggactccattcatccctccgaggcagcttacaaatacctagggaacttcatagatgctcagattcaagagtggcttaagacttaagtcaaacttcacgatttacgaattaattaactaaacaatgtattttacttaattagcaactaaacaaatttatggcccttaaaatattcaaaaaaaaaaatgtcaattttcaggcaacctaatttaatacgagatgtacttgtttgggtgtgagttaagtaagctactgatttttcaagttgaagataaacctgcttcctcccaattaaaacacacatttacttaaatattgaatatgattataacattattaatatttttttgaatgtaaataagtcatattagttagtacttaatagcttgatcatccttaatccccaactttgtttcaacgttgaaaatagctccgcgtgcacctttacaagtttagtatcgttttacttacaaagtttatgtagcagaggtgtcaaatttaggcgtcgataaacatctaatgtatatttatctatataaacgaaattgggatatagaagtgagggtgtgagtgagaccatggcccatggacgtatgtagtgtgactcaaaaggtcaactaacaatttatttaaaagtaaaggttagttacttagttatagagttcaataccaaatccataccacaattttcaactcccatcgaaccacttctttcattttttattttcattggctggttttgtattgcaaccgctattatgctgcgcgactcattagctaggttttctagtttacgtataagaggatatgcagaaaagaacaataaagataacccgaaaactttattgtattttagtttaggactaaattaatttgaagaaaagaagagaatattatctattttaggatataatatagaagtacgtaaattaaatgtatacgccataatgccaagaataataaaaatgaacttatgcaaattaattttaaggaaaaacaaaaaaaaaacttatgcaaattaaaaacgtgtatcgttgtatgctaagggaaaccgaagaagatacatatgtttgaacgtaaacattaatttcattagagaagaagaatgtgaagatcttctaagtgctccaacttaaagaaaaacatcaatttaaatcttagttaataaatatcatttttagctaattcttcccaattaaaacaaacaaagtaaaacaagaaatttttgatttgcatgatttttaataatcaaataataaaggatcctagtttcgaattagtctagtgggtgtaccgaatcaacttaacccattgtgagattttcttttttttctccctcctgctgactctaaacctaatattagtttccactttggtaaaatataataaattgtttaattgctaacgaattcacgaagacctctgttgtttcccgcttagtgtgtataaataccactccttccttttctccaaactcatctcacaaatctccaacacagagagcttctcacagtgaagcaaacaatggagtcttttcggcgattctccttgctatccttcattgccctacttgcctacttcgctttcctcgcttctgctgaacatcacgtccatcaattcgtggtaagctagctactaatgttacattaaagctttttggtatgttcttacgtttatagaattcccttaatttaagtttaaacgacgatgactttagatcacaccgacaccagtgaagaggctgtgcagaactcaccaaagcatcactgtgaatggtcagtaccctggtccaacgcttgtggtcaggaacggtgactctctcgcaatcactgtcatcaacagagcccgttacaacattagtattcattggtaaaatatttgaccatcaaattcaacaaacatatgttatgttatgttctctgttttcatactttgttttttgctctgttttttgggataggcatggaatcagacagctgcggaatccgtgggccgatggtccagagtatataacacaatgtccgatccgtccaggacaaacctacacttacagattcaaaatcgaggatcaagagggtacgctttggtggcacgctcatagccgctggctcagagccacggtctatggtgctctcatcatttaccctcgtcttggttctccttatcccttctctatgcccaaacgtgacattccaattcttcttggtaaacaactaaacattttgtaacttctaatcacttcaaattatattttcatgatcacaactaataatacttactaaaataggggaatggtgggatagaaacccaatggatgttttgaagcaagcacaatttacgggagcagcagctaatgtctctgacgcttacacaatcaacggtcaaccaggcgatctttaccgctgctcgcgggctgggacaatccgttttccaattttccccggggagacggtgcaactccgtgtcatcaacgctggtatgaaccaagagctcttcttctcagtcgccaaccaccagttcacagttgtagaaactgattccgcctacacgaaaccattcaccacaaatgtcatcatgatcggtcctggccaaaccactaacgtcctcctcacggcaaaccagagaccaggccgctactacatggcagctcgagcctacaacagcgcaaacgccccgttcgacaacacaaccactactgctatcttacaatacgtcaacgctccaacaagacgtggccgtggtcgtggtcaaatcgctcctgttttcccagtcctccccgggttcaacgacaccgcaaccgcaactgctttcaccaaccgtctccgatactggaaacgagctccagtaccacaacaagtcgacgagaacctctttttcaccgtcggattagggctaatcaactgtgccaacccaaacagtccccgttgccaaggtcctaacgggacccgattcgcagcaagcatgaacaacatgtccttcgtgctaccacgaagtaactccgtcatgcaagcatattaccaaggcaccccaggaatcttcacaacggattttccgcccgttccaccggtgcaattcgattacacaggtaacgttagccgcgggttatggcagcccataaaaggaaccaaagcttacaagcttaagtacaaatctaatgttcagattgtgttacaagacactagcattgtcacgccagagaatcatcccatgcatctacacgggtaccaattctacgtggtcgggtcaggtttcggtaatttcaacccgagaacagacccggctaggtttaacttatttgacccaccagagaggaacaccattggaacacctccaggtggttgggtggcaattcggttcgtcgctgataatccaggttagatgatcttattgactcgaaagcatttgatactttgtaaccataggttaaatgatcttattgactcaaaaatgaaaaacatattttgatatacttgtggtgtaatgcaggagcatggtttatgcattgtcacattgattcacatttgggatggggtttggctatggttttcttggtagagaacggtcgtggacagttgcaatcggtgcaggctccaccattggatcttccaagatgctaataaaaaacttctaccgttggatctaaagaatttatggggtttggttttttgttcttgttttttaatcaaaaaaagacttcgtgagtcttgatatgttaaagatggacaactgctctattgaaagtggttcaacctttgttttcgatgtacttttgttattttcctcgtaatagagtgagtgttttcatttttccgattaaaaatttaccaaataaaagctgtgttagttaatcttctttttctagctgactttcccaaacaactttattagttattaacttaatatgaacccacaagatacttttaattacattatcatacataaacttttcttgcaaaaatagcatcatatcgatctttaattgcccatctttacgagaaaataattcttgaaaaagaacgtaaatagtgtggttgcgattccgttgatcaaaatttaccattaaactgaaaaaaaaaaatagtgatccatgaattacatttctgtataacttcttccacaaaaagatgattttttttggtcaactttctccaaaattctcaaaacaattcgccgtcaatgcctataactcgacataagtaaattgactacaactgccataagattgtaagtttggtggtctgttggtcatcctgatggaatgtagttgtaccattttgaactataatagaatctaatgagatagttttgatcgattgttataaattggataaccctaaatgtaaaagtacaaaaaatacattcttcgttgtggaatcctaataaacaaaattgtcctctggatacttaataattcaaacgtcatgacataagtgatccaaacatcacaaaaaaaattcataatctattggaacaaaaggttgatagacttacatgagtggtatccattccaatcgacactaagatttactgatcccaagttgaattcatgcgaaaatatttacactaaaatggttagaaataggatttggtatggtaaacatttttgggatactctttattggtctcgattttgcaatcaacgtcgcaaataattgatttacgatatcttttacctcacacgaaacgtgtacacaattgtgtattctttcttgcacaaccctagaccttagtttaaacttcaatcttctccgcaatgaaataaaatacacaattatacataatttccataatccaacatttttttttttatatctaaaagcacctccaatggagagaatctgtcgaagggttctctctatttttttatgattaaatttcaaaaaaattaacaaaagagcttttttcttttttttggttttttatagtccaatggtaggttcttttagaagaattctctggaaaaacaatattaatataaaattattttatttcatacaatttaataattattacaaagtataaaatattaaacatacattaatttgaaatattataaaatagatatgaaaaaaaacggaataaagatcagttgttctgttgattgttacaacatttagtcacgatatacaagagaaaatgacttgattcatacctaatttggagaatccgtcaacgattactctccaaatcatattttctattctccgattgagtttatcttccggtgatagtcatcaccatctgcaatgttataaaagtcatgcagtacgtacttaggtgctagagtaccgcctatttcggattaatcgtcgactaggcgttaaatcaaattggcaaatatgctatagtttatataaatatatagtatatataacttttaatcagtcatatttttaaaatttgatgtagcattgtggtctggaaggttgtttttggtagccaaagtgataagttcgatacctacaagtggacaatattatgcattttagttaaaacgaggggtacatctgtaatttcacgtacaaagtcaactgcttttcctacaaaacctaatcgccgtcgtcaaacctgagtttttttttgttctgattttttcgtatttcttctatttcctcatcattttatcgcatctctttaccaaaataacacaaatacaacattaatctttggatgattgaccacaaaatggaatttaacgtagtcttgaacacacgaatttttttgtttcttttgttaagctttacatccaatcaaatttggacacgtgtccgtttctctcctttcttcaaaaacttcccccagctaccatcatcttcgttaactccgctaaagcttttttaaaaaggattactactgtttacttctctgaatgcgttcactgcttcaccgtactatcttactcacatctccgtctcattctcttatccggcgcacttctctctccgccatggccaccaccgcctcctcttccttgctcctcccttccatatctctcaacaatctctcctcctctaaaaatgcctcctttggcttcgccgccaagaatctcagccgatctaggatttctatgagcgtctctgctggatctcagagtactactgttcacgattctctgttcgctgattacaaacccacctctgcttttctctttcccggtcaggtaacttccgattacatgttatcaatctgaacaatgaaaatgtggactctgattgatttcgtatcaatttaggaaatttggaattgcccagattgaaaagtttgctaattttgatctgattgatgtgattttaattacaatgtagggtcttcatcataacgtcatattctttgcttgtaatctctcagaactcgtttcaatttttagatcaaatgtgacaaagtttagatgaatttgctatgtctcagggagctcaagcagtaggaatgggaaaagagtctcagagtgttggagcagctggagagttgtataagaaagctaatgatatcttagggtatgttcctttgtttaaagttgaaacctttttgtttgtttttgtgaatgaataaactatatggtggctttctgcaggtatgatcttttggatatttgtgttaatggaccaaaagagaagcttgattctacggtcataagccaggtatctttgcaacttttggttagggacaacttcagatttatgatcttctttcttgtctgttgtcacctaactctagcaaaacttaatttttatgtgatgtttccttttagtatgtacattttggtatgatgtctaagttattggtctatcattttctcagcctgctatttatgtcacaagtttagcagcagttgaattgctccgtgttcgtgaaggcggagaacaaataattaactcggttgatgtgacttgcggtctcagtttgggagagtatactgctctggcttttgctggagccttcaggttagttaacatctgaatcaatatccttaactgaatgatagaggtatcaaatctcggattttcaaatatcattgtaagaaagtatgtcactttgttcccttttacctatgtgcatcatcacctaacttacttttgttcttttctctgttactgtttttattctcaagcttcgaggacgggctgaagcttgtaaaacttagaggagaagctatgcaggtaagattgaactctgctctgtatatccttcattgactatgtcaagtttaggttgatgttgtgacggctgaactttgtagtgatcttatataccattcgaacagctgcattgacttttagtttttgataaaatgactttcttcaggctgctgcagatgctgctaagagtgccatggttagtatcatagggttggactcagaaaaggttcagcagttgtgtgatgcagcaaatcaagaagtagatgaagctgacaaagttcagatcgcaaattacttatgtccggtatatatgtcttccatgaatcttttgcattctagacttgtataaaatcattttcacattcctttatgtggtatactgttacagggtaattacgcagtatctggaggtcttaaaggaatcgaagttgttgaagccaaagctaagtcattcaaagcacgaatgacggtatcctctctctctaattccatttatgttatgaaatcttcctcgatgctatcagaaacatgattgttggcggttggttctgtaggtgcgtctagctgttgcaggtgctttccacactagtttcatggaaccagcagtctcgagattagaagctgcattggcagccacagagatcagaagtccgaggatcccagtgatctcgaatgtcgatgcacagcctcatgcagatccagacacgatcaagaagatacttgcacgccaggtaataaatcaatactcagagaactatgtgaattatttctcttttggcgacgctatataaaaaaaagatgcaaatgttgactacaggtgacatctccagtccaatgggagacaacagtaaagactctcttatccaaaggacttaaaagcagctacgaattgggacctggaaaggtatttttctatcttcgtaaactcattatagatggaggtttcttcttcttcttctaagttgtgtgttttgtggcattcaaacaccaggtaattgcagggatattcaagagagtagataaaagcgcaagtttcgaaaacatcagtgcttgagagtattgctagctttttgttcacatgtatttgagttgagaatcattgataataagtaaatttacaacgtatgtctgtggatctctctagtgcttcaatagtttggaattcaaagttttgtatggaatatttatgtgacactttacaggatatatgtattgagatatctttttagtttcagttgaagtgaagtgacaaaatctcaaatttgtgttactagtttttgggttttgctgctcaatcaaaaaaaaaagtaaaagaaatgagtgagctcagattatagcgaggttaatatcatatccgaagattcatcaccacagctcaagatattttcatcactgctcacatgctactagatgcaccagccgggaatcgaacccgggtctgtaccgtggcagggtactattctaccactagaccactggtgcttgttgtttcaactacgtaagtttagttaattgtatgttatttgaagtcgagtgatctggttgaaggttttatgctatgctaatcatggtttatggttttgatcttagcgggtatttattggatggtgattttacccagttcctaatgatacaagatgaatcagtttatacatgtcaaaattcttgtttttcaaatgtttcaacatgtatatgtgttgtatcatctattgtaaattaagtacttgatctttctcttatgactttcaggaatatagttacagttccaatgagaagttcataaaatggacagtgacaaacatgaacgttactaaccggtggaagttgggttcatgttatattttaaacaacttactttgtagcattcttcttttgggattctcattttgactcggacactctccactgaaactagttctatacccaataagttggtagaccatggttttttatgagttacatttagtttattctaaataatataattataagaatatgagttacgtgttgagctttgtggtattttaaatggacaaactcatgagttcttacaattaaaacaaggactttcaataattaaataataaaaaagctataaaacaaaatatagaaacaattgttaattaaaagaattagagtaaatttccttaagagacctatttgaagtgttaagagtttttataagagttgaagattttcatccaaattcatggatcatttattgaatattattgacaatatcaattttttggatgcgaaaaaacttatctttctttgagtatgtcacataaatgatcgagtgatttggatgtaagaaaattaattagaaacgttggttttacctttttttggccgagatgctttatttcaagaacagaaatagtatggaatatagtaagagaaattgagtgataatacaaaaaatgttacttgaaaaatttagtttacataagggaaaaaaaaaagagctcagaggtgtggcatatctcaactgataattcagaaaaatgcaaaggacccacccaatgcttaagccaatatcatcatagcttagtgcaccagccgggaatcgaacccgggtctgtaccgtggcagggtactattctaccactagaccactggtgcttattgattctatctcttctagttaataattatctctaaaattaaacaaccttcacacacaaagtacgcaccaccacaggattgaaagagaacgagagagcaagccattgcaggaaatggcgattccagtgacgagaatgatggttcctcacgcaataccatcgcttcgtctctcacatccaaaccctagtcgcgttgacttcctctgtcgctgtgctccatcagaaatccaaccacttcggtctctgctctctcttgtactatttcgagtttacgttgttcgaaactgagaactcatttgtcaaaatatgtttgcattttcctttaggcctgaactctctttatctgtcggaattcacgcaatccctcatccagataaggtaacaccagaccaaagtctctgtttttcttctttggatgtaatgaatttggatttgcttagagaatatttatgcaattaaaatcgacatctagtgtcgaaattatataggtagagaaaggtggtgaagatgctttctttgtaagtagttatagaggtggagtcatggctgttgcagatggtgtctccgggtaagctttagcttttggttatgctaacttttgagtttctttgtgggtttatcttaatgttgataaagtttatatttttttctgtctcagttgggctgaacaagatgttgatccttccttgttctctaaagaacttatggctaacgcttctcgtttagttgatgaccaagaggtcagatatgatcctggttttctcattgacaaagctcataccgcaactacttctagaggttctgccacaatgtgagtgagatttgattgttattctcttcaaagattggtttttgttccctttttggatagcttgatgtcccggttattgatgaaagcagtattctagctatgcttgaggaagtgggtattctcaaaataggcaatgttggtgactgtggacttaagcttcttcgggaaggtactacactgtaacctaagatgctagattgttttcatgttcagcctttgacaaagatcttcttctttcattctcattttcaggtcagattatttttgccactgctccacaagagcactattttgactgtccttaccaactaagctctgaggggtctgctcaaacttatctagatgcatcggtaaataaatccttaccactcttcatgatttgtgctagtattgtacctttgtatcattttttttgcatttcaagcagtttagcatagtggaagtacagaagggagacgtgatcgtgatgggttcagacggacttttcgataatgtgtttgatcatgagatcgtttctatagtgaccaagcatacagatgttgcagagtcatgtatgtatatgtatataccatctctcttgatttttagtaagttacatgttttttggtataaccattacagcaaggttattagctgaagtggcgagtagccattcaagagatacagagtttgagtctccatatgcattagaagcaagagccaaggtaagatttttaacttgatctaagaatgaattttaccagttcacgcaaagtatatctgaatcaacgtatatgtgcaggggtttgatgttcctctctggaagaaggtactaggaaagaagcttacaggtaaataaacaacaatgttgatgcattatcctgacatattatactaaacaagagtagtttcttagttgagatctctggttctgaaaattgcaggagggaagcttgatgatgtcactgtgatcgttgccaaagttgttagctcatgaatcactctgttcatgataagatcttctctttattctttttgtacaagtccttgtaagaaacttgttcttcacagaaattgataaatggtatttcaaagttcaaacaataagaatcgaatctttatcattgaccttgtgaatggacactctttaagctcatctatctctttatagtatctttctcattaaaacaaataaaagtacaaaatttctctatcaatgcaaaccagaaaaaaggccttggggttgttgtaactctaatctgataacattattgcgtgaagaaaacaaataaattatacaaacagagatcttctctaagagctagtgttaatactaaccaaccagtagctagctctatgaagaatcaatgacctgaatcaggcaagtaaattatgccaaacgcatgtatgtttgtgtcttttcaagctgcgtttgcttcaccattgagatcttgaaagaaagatttgactgtttcataagtggaccagcaaatcgcagctgctggagcatggaagagcattcttggtagccatcctctagcaagtcctctataaccgtctttcttcactattgtacggaacacatcgcttattgaactgctcttgaaacggtcacaaccacacacaccctgaaacatcaccacaaacaaacttctcagaacaaacaaaacaacccaaatcctatgaaatagctattgaccaagtattctaaaccacaaatatagaaacattatctatgcgactttcacatgtaaattcagtaatattaagttttatgaccatagttctaacaatgcttgatgcaatctacatgttacctataaaatcatactcgtgaaatcacaaaatatccaaagagaagaaagaagatatctttcttcattcaagtgatctataggatcaagagacaactacttaaagtagcttggccaatctataaccacattagctatcagatacttaaaagtcagtagctttagagatatttcaatcacctgacattgcaactgcgtcttaacaacatcaagcggagtagttacagcagccgctaacccaccagccgcagctccagcagtagcataaatcaaccaaccttcctcatcctctgctccaacagcatgctcaggcaacatctccctcaaacctctcttaaccgcctcataagtagtgaaatgcacagcggtaaacggagcattcatcaacacagtagttctatacgaagcgtaaaaagcaccaaacccttcctcacgcgttactctcttgatacaatcccaaactcctttataagttccattcccaatttgcaacctttgcttaaccatatccattggagtaaacacagcatcactagatatagtagcgaaaacaccggaaatagcgtgtgcagcagagttattagggtttccaccggataaaaacttcttagagacttcatagaatgagaaataaacagcgtgagctggtccagcaccaagtcccatagcccaaatacctctatataaagcagaaggtccatcggttttgataattgaacggaaagcttgacggattccgattggtttaatcggacatgaacgaagagcttgcatatgggttttgactgtatctactggaaacatagccatgtgttcgactgagccagcgattgaaccggcgaccattagttgccagaatttaagagttgtgttttgagctggaacgatgattgctggatgaaaatccggtggttgtgggattggacggagatcggattctgggaatttggttgttgcttctgttgccattgtttagaattgattgagagaaaggtttgagcttttagggagattaggaggaagatgaatctgaaggaggagaggtttggttaaattagggttccgagaagattggagaaatgaccaaatctggagatttctccgaccagagagagaggatgcggcggttaaactaaagacaaagcatgggagaaacctctgccttgtcttgtgggctttaacatctttttccccaagtaaaaatatattttttgcctttttacgtttttgcctctttagtgttttttaccaaaacaaaaacgtacttttttactttttttttttttttaaatcgtactttaatttaagcgatatgaacctaaccaaaaaaacttattagattatgtttatattatgaatacgaatattatttttttgtcatcgtaaatttttaaaactttggtagaatttaaatgtacacaagtggaaaaaaatttatcccttgaaaactaataagtgttatctatattattaattgagaagtattgtatgaactacaacattgtaagggtagtttaaaattaagtaaatgaatttttgcatgggtagtttagtaaattaacaatcactacaacaaaataaatatcttggattttgttcttttaaaaaatcgactttaaaatcaatatattcataattacccaatccctcgatttttaaatatacaaattatttttaaatatattaatccaagatgtaccacatgtcaatccctcgatttttttattatattacaataacaatatttaaaataacaaaataatttttcattttacggaatgaaattatatggtgggatgagtttgagttgatattaataaaggacgataatctacgagtgaaattttagaattaataattataacataattatatattcttaaacattaaacaaaataaacaatatttacaaaataactatatcttaaaatttgaatttttagttacaaaaaaatcgaccaaaggtgtaccacggagaaaattttacattatatcatctaattgatcaaatttcaaacaaaaacaatcaatttatatatacatcaaactaacaaaaatacacaaattttctaaatatctctatattattctacaaatcgaaacaaatctaacaatctatttactatgcaaaatacaaataaaatataaataatataaattacaaaaaatagctattttatcataaataacactttacactttttatgcatattataatttatacactataatatctttcactaaaaatatattccaatacatttttaaaaatatgaaaccccgcacgtatacgtgcgggtcagaatctagttatttataaaccgataattcttaaaaacgaagaactcaaatcaaaaataaagtaaaaaaaaaattgtcctaaagcattagatatcaagtaaaatattaaatttactgcaaaatatgttaaaatattggtagataaaacatgagatgtgtgaaaatcattcctattaagatcagattttagaattttatgcagaattggagtattttctctaacaaactgaataaaatctttacaaatctacagctacagcttacacttacatccaatattctacagcaaataatctacagctatagtgtaaccaatcagccagtaagctttaccaaaatcaattcatttcataaattattttctatatttgtctcctcacaattcatttccaaagtcaaacaaaaattaggcacacacgagattaagctctaccaaagagtctaacaaatgaacttataaataacagttttacaaacaatcttaaatctctacaaagtttgaatctttaacaaacttatacaaatactaatatagacttgaatcattaacaacaatagaactcacacgatcttagtaatatctttaatgaaagcatcgatgttagcatcagaagaaccacctttcgcaaccgctccacgacatatctcactgagatcacaagtccttcttctcatctctttcccttcttcactctctccatccataaacctttttaccaattccttgatctcatcactcactatcaacaactccatctgcttcttcctctcgatccccattccaactctccactcctcaacaatcatcttagcattcagaaactgatcccaaaaaacaggaaatgtaagcaacggtactcccgaacatatcccttccaatgtcgagttatacccgcaatgcgtccaaaacccgcctatagccgcatgacacaaaacacgtagctgatcacaccagctcaccacaacacccaagctaccttcaagagcctccttaagctttaactcacccccacgagccacccaaaagaacttaactccagcctctctaactcctacaacaatctcctccatctgagcttcggagactgaaagaaaactcccttgagatatgtaaagaacagagctttcaggttgctcatcaagccacttaaagtaatcaagttctctattctcatttccaacggatagttcttccaagggtattaacggaccagtggagtaaaccgggaaatcaaacttggaagtgaaaaagtcaatggcttttggttcgagctcataagcagaagggaagagaagatacttagctttataaagctcaccgaaagactttttgaatatattgaagacttgatgactatagccgtgtaagatctgtaagtcactgagtcttgtcggagataaaccggggatgtaatcaacaatctcgtctagttttgattctggaaacaaacccggattcagaaatcactaattatggatgaaagtattgaactttacggttttgatcagtaaaaatgggaactttgtaactacctgatggttcgatcggaaaatggccgtgacttgcgagaagatcggagttaatgaagagggagagaatcgtggctgacgtagtccagaaagaagccaccggaatattcctttttgtgcctacacgtactgcccaaatgatgtaagtatcggcgatgattgcggtgggaggagagtttagacggtcaagtagctgttcgaacggctcttctaatctggtgaggacggcgtcgatgaaggcgatgaagtcgttggctcggacgagctcggagggaatgatgttggggagagtggcgaaatggatccggttaggtttcgggtcggacccgatgaacccgagccattcttcggtgacgacgaatgtgacggtgaggtttgggtctcgccggacgaggcttttgcagaggtttaacattgggttgatgtggcctcttcctggccaaggcatggccaccacgtggcggactccgagtggctgaggtttgattggattcataggatgtggaacgtgtttctggttactgtgactttgtgggtgagagaagtgaggactgagaaagctgcagagtgcagaggatagcttttacaacaaacgtggtccaattgtttaggccattacccataatgttaatgattgtgtctacttctctttcaagctgtttttgctgattatcacatttgttgttttttataacgtttttagacactcaagtgaccggtgtgctttttaaagaaacaaaacctaatcccaagaaacagactgtttaagaaaacaacacatggctaattttttttttttttttaattaagacaaattagggagattgttatcattctgtttataactaacagaataacaatctagttgacaaaaaaaatctacatagttgtaaattttttgataacaatgtgttttcttcagtgctgttaggtttaatttcattcattggactcttctcctaatgtagtccactcgattatgttagaggcagagttctcaggtcatgttcggttgtaatattctttttagttgcagtttaataaattgcgagagacaattgtctattctcacctaccaaaaaaataagatgtatgatcatttcgtgaattgtagagataggcctcataataaatcccgttttaagttttgcttcaattttgttctctttttcttttccttgtatttttgatgtgttttgggtattttgtgacgtcttggggtttgattaatgagaaagcatcattttagattataagcaagcaaaatgatgatgcataatgcataagcggggagctttcccaccattagaatttctataaatttttgacatatggtaagaaattgatttagctataatttggtggtggtttttactttttagtcattcaaaagatacatatgatttagtgagcatgccattgagccttacattgtattgaaacaataaaacctctttgagccttaatttgtattggtaatatgccgaacgaactcatcgatgtttacattagacgaaccgcttttcgcaacagctcctcgactgatttcactaaggtcacaagcccttcttctcatctctttcccttcttcactctctctatccataaacctcttcactacttccttgatctcctctctccctatcaacaactcattctttttcgtcctctcgatcctcattccgactctccagtcctcaacaatcatcttagcgttcagaatctgatcccaaaacaacggaaacgctagcattggtactcctgaatatatcccttccaatgtcgagttaaacccgcaatgagtccaaaacccgcctacagctttgtgacacagcacccgaagctgatcacaccagctcaccactacacctaagctaccttcaagagcctccttaagctttaactcgcccccacgagccacccaaagaaaccggactccactttctctcagtcctttcactatttcctccatctgagcttccgagaccgaaagaaaacttccctgagatatgtaaagaacagagccttccggttgttcctcaagccactggatgtaattaggttccttgttatcattttgaacagaaagttcttcaaaaggtattaaaggaccaatagcgtagaccgggatatcgagcttggaggtgaaagcgtcaatagctttgtgttcaagctcataggcggtggtgaagagtaaagacctagctcctggtagttcatcgaaacacaacttagctgtcttgaagactcggtcgctgtaaccgtcaaatatcggcggcaaatctcggagtttcgtcggagataaaccggggacgtaatcaacaacctcttcttctttagattccaaaacaaaccaagaatcaatactaacttttcaagaatcaatactaattaagtttcaacaagaatcaatatataccaagtttcaagaatcaaaactaattcactgatgctttacctgatggttcgaacagagcatggccatgacttatgagtagatcagagtggaggaagaaggagagaatcgtggctgacatggtccagagagaaaccaccggaatattcctttttctgccgactcgcacagcccaaatgacgtaagtgtcggcgaatattacactcggaggtggtgaattgaggctgtcaagaagcttctcgaatggttcttccaatcttgtgtagacggcatcaatgaagcctatgaagtctttggccctgacaagctcggaagggatgagattagggagagtggagaaatggatccggtcgggtttcgggtcgggtccaataaacccgagccattcttctgtgacgacgaaggtgacgtgaaggttagggtatcgacggacaaggcgtttgcagaggttcatcatagggttgatgtgtcctcgacctggataaggcatggccaccacgtggcgaaattggtttggtggagattcatttggatccataggttgtttcttgtgaagtgtgtgattttggtcactgtgacttgaggaggtgaagaagagagtagtgggatgcaaaaaaaaagttttaacattaaagcaaagttggtggtcaaatgtttttggtcatttggtgtgccgtatacggcgagtgtgactttaaagtcaaaaatggttacaaaattcgatttttcttcattccatataaaggcaagacaatttttgttttgtgtggctaatggctatgtggcaacattgatccaagtttgaaccagacccaagaccaattattgtttagtgacttggtttagagaatacttataagaccttggtttaaagaagaagaaagtacagactctgagcccaagaaattggaatgatcctgttttaggtgagtgtaataacacttgtccaaacatttgagaaaattgaaagcaaccaaatccgaaaagccataactgtttatttattatttctcggaccaaaatatttcaaggccaaatactatagtaatgggcctccatatttattctttcttcgtccgatcaatgggtttgctgcataatcgtttcttctttccatctctaatttggaaagtggaccatatagtcgactttcagatattgtatatttcttcgaccttgttgtgatatctcttccttgaatatcattacagcatatatggtcatttttatttgcattcattttcatatgagaagataaattagttttaaaaaaatgtttttactatataagactctaccgtctatatattattttgaaaaagactcggtcagatagaaatatggctgagaatttgttttccatggtttttatatcataccttgattgggaaattgaaattttaagttattctatggtttaggtgctttatcacattttttcccataaggttttttacatttggtttttaggttttctagtattattacaaaatttacgctatttaatttagttatttgcttctgtcatgtgtagagtttgaagatcgatcgcttatgtgaagctataattttgtttattttcttttaacttcacagcctgaattcgttagcgcaccaacggaaattttcgttgaggtgtggataaattaattaagcggctatacactattggatgtatctgtaaatcttaacttttcttctgccattataatcatattatttctcttaagactctttctgctatttaattaattataactttggcttggcaaattaaaaaaattagttcacacatggcaaaaaaagatgtatttacacacgtgcatggagcacatggacgtctaccggtctacgtgttagtaaaaagacatatacatgcgtctaacttaataatttatatagtgaaaaaattgagagagaaagagaaagaattttttaacaaacaaaagaaaggttcttattcctaaatcctaattaaaaagttgttacgcgtaaagttaaagatagagtattatatcccactaattatatagcatatggtatgaatatgacagttataagttctctggcttggtaggatcgtcaaaaacaagttaagggtatttatatagatatataattaaatttgaaattaaagaacatgatcgattatttttttagtcattcgattcttcccatgtcgacaggcaatattttgaaaatttttcgtctactgatcacatgaatactatcaatagataacataatcaaattcaacaccaccacctcttctttcctaacttaattttggtgaattaaatctatatgatttttttaaggattagtacaaaagcaacagtagaggcgactttgtgttctaacgtgtagcttatgattaatcaaatcaggtcggtcgaataaatctattgtgagtcaaattgtaaaggttgaatcatgtagattttctttttgaataaaatgtagtttgcaacttgaggtttatttttctattcgatttaatttcagtttatcgcatgtagaaatacaatctacttttttagtctatagtaaaataattgattccataaaaagaaaaattgcttttgcatgttttctaagactactttaaataagtttaataaatttttttgtatatctgagattttgagtttagctagtcttttagctattccataagacaatctaaatgtctcttaatttgaacgcggcaaagttgtgtcggtttgtttgagaaaaagtgtgtagtggttagagagcaatgtcttggcgacttcatattacaaaaaaattggattgaattagatctaattttcactgttcaaacgatggtaaaagaaaaatggaagtgagaaaccaaattaaagagagaaaaagaaaaaaaaaaaacagatctccagtactaaagcataactacatctcatcaccatcacatgcatgcatttaagctttgacttatactactttccttacacgaaacctgttcccatattctctttttcaacataaccaagtagcaaacttgtcgaacattaattattattattattattacattaagtccaaagagattcttgcttaagagggtcttgcatttgcatttgcatctgcatttgcattatgctgcttggtgaggcaaagttagagttgaactgtccagaagacatggcataaccaaagttgttattgttgttgttggtgttgcagttattgatgttgttgttgtttagtaagagagctttgtggtcttggtctagttcaagtacttgatgatgagactgtaaggttggctcattttgcatctgaatgcaaagaatctcggcttgagccactgctagttgcatctgaagctgcgagacttggttttgtaagtaggagattgctcctacgcagccgtagaccggatctcttactcttgcgtttgcttcaaaaaccagactattcaccgcgtcagctctttgatgaactggtagctcctgtgacaatttaaataatcatgtaaacattttctatatagaacatattttgtagcacaatttctgattcatatatgtccatatagtagtttatcaagcataactaatcaactaattaagaataaataatatgaaagtgaataagggttgttggagtgaaatatgtttatttttaatgtgtatgtatactatacaaatgtttaaagaagtttgatacttgaccaaacacacactgaatgttttggaagagagatatggataaaaatagaaagcatatggaagggatttcaacggaccaaaatatcatggaagaaaaaccaatatatagcatatagttatggggaaatgagaaggagatggaacctgcaacattttgctgacgttgctggcaccaaagaccttatgaacaatggcgaatttgtgaggatcgtcaggaggaaaataaggtgcgaagatgcaatcttttgcacatcgtcgtcgaagaagcttacacgaagcacatggtgatgatccgggaccgcccatcttctactatgatcgtgattacaccggttttagttatccttgtaagttaataaggatagagttctcttgagctttgagagcagagaaagaagaaagaaaaacttagagttaaagggagagagtttgagaggtgtgtatttataatagggttttgaaggctttctagagagagcgaggttggtgttcacatgtgttcatttaattccaactttaattttttgtgtgttataattaatgtcttaactttaaatgttttattatttaacctaaatatgaaaacacctattcttagtttttcttgttcttctcaccacaaagttgtattcttttcgttataaaataattatcattttagaaaaaaaaatcttcaaaatagatgtcattttaagttaagtcttgtttgaatcttatgcaatttaaatagttcaaaagtacagtgtatatggatccttaatttggattcttaggacgggatatgtacatattaacggctaaaaaagacgttggtaatgacgttttgaccatgagaatgttgagggcaatatagtaagttaggagaagaagaagatgtagaagtgagcaccgcaaaggcgcgtgataggttggcgtccgatgcatattgagaagtttccccacgttgtccttttgactcttctcttatttctttaacacatacacacgacagtcgtaccattactaacctctcttttttttatttattcgagtctctcgatgtcttaatcttctctcttttttaaattacaaaagtcgaggaaagtgagattggtggttacaaggaaagatatttattaggttgtgtaattagaaacttttgaagaagaggaagatctacacatgcatggttatacagttcatgatgatcgagtatgtttagaagttacaaaagaactcatttgatgatctcagaagtttgagaatcgcttacttaaggaagtgagaaaaccaacaaaaagtttcgttccatgctttcatacaacttatttatagatataatagaagaacaaaaacacgttaacacaattttgggctaacgatttataattaaaaaaataatcaacaaaacaatatagtcgatctaaaatgaaagaagcgttcaacagagaaaacaaaaagagattttacaacaaaaagagaaaaagccaacacaaaataaaattattataagatatatgaatctaatcctaacatatgtattttaatggatgtctagaattatatatatatatatatatatatagatttgaaaccatatatttgtgtaatataaaactaataattgtcacattttctacaccctaaacaattaaaaatatatcatccgtttatattattatacatgttgaaaaacatctagcgccctatatttgactttattctaacacaaaatgaaaaaacgaaaaaccaaagttggttaggtaattaaaaataagaatgaaaaaaaaaaaaaaaaagagagagagtgggtaatgttaggataatacactatagaagtgagaatgacgtgaaaccctaattaggaccaagactcctttggaaatggcctccaacgtgaatgtttgttgccttgaaagacattcacatcaaaacttcaaccaatctctcctccacacacacttcctctttatactattaattaatccacattcactattttaaacttttgtaaagtgattatgagaataataatgttggggaggcccgagttttcatgggaagacactgattaaacaagggactgaattaagaacttgggataattatcattattttctccccgactccccctatttaaagaatatacaaaaatctggacagaatctctgcgaagcatcttaggtcagcgaattcgatgcgtgaaaagcaacatttgtttttatcggattacgtagagccagactaagaaaattcataaactccatctttggtgataaaacttgtcttatttaactaaaaccaaagtaagacaaaaccatggtaaacgcctcaattgtttattttaattaagtatcagactaattgttttttcttggcaccacaaaataaatttaatgtttatttagcattaacgaatgagtgtggtttcacacatttctagtaaaacataggttttgttgcacgatagcagtcaaaaagtggtcttgcttttaccattggcttgaaaacaagattaattgtctcacataaatacacggaagtctttatcattcggttaaccattgttagatttatcaataaagatttagagtttagtggatcataaatattgtttgacaaaaaaaaaaaaaaaaaaaaaaaaaaaaaaaaaaaagtggatcataaatattgtgaaaggtatgagtgaactacaactttggatttcgttaaacatacaaaggacttaaatgacatagttaataatatggatgtgaagtttagtggtgtgataaatattatgggagatgatggactaataattaatccataaaaattcgcacaacaagacagacgttgaacatcgttttgaacaacctaataacctaattaacgtccaaaaagttgtagatgtagtttctttacacagtattcaaagacctaacctttttgaatccaaacagaacaagtatttgtgtactgttgctttgatttttctagccaagccttcatatgacttcttctgtctatctacgtaccaaaagcattaagatatttgtcatgagagatatgaaattagactgttgatcatatcttacaattttaatactgctgttttcaaacggcatatatattaaccttgtgattaaatgctctttaagatcattgtgaatatatctgttcacttatatttttattatccgacgtatcacgtatacatgaaaaacaatatgctatgaagcttgagaaagaggagagagcagcctttcaggaggaacctgtgacacctgcacggatgcctggctggaacggtttgacaatgaattcaatcttgtcttggatgcccacccggaagtagcattagcaaggccaataagctgaattatataatttgagtaaaatccacaatattctgctgatgttattcattttccaacaaaagaaaattccatttctggttagagcaaatagaaactaaccatttcttttaaaaacaatattcttttatttaaaatatacatgttaaaagaattttattcttttgttttttttttccctaccaaaaaaaagaattgagtttttttaaaaattaaattcaaagaagtcttgtgtatatttatcaatctttaattttttttttttttatcaatcttacatagcacaactcacatatcttgtttttggtttccaataaacgggtaaatacgtaactaaaacacatattaatcaaagtatatttaacacttctacaatagccagtactaaaacacatacgtatagtcttaaccaatatgacgatttgacaatcactataccgtttttgtttttgataatttttgttaagtttagactatcatggaattggttcacatattttgtagtttctcaaatatatacatgtctaccataattctattttagtatttatatacgtgtaaatatatatatatatatatatatatatatatatatatatattaaaaagaaggcgtggataaatcataacaagattacccatacttaatgaggagatcgaagatacatgcatcactttcgaactattgatcttgagagggattaagtaagaatccattgtgtgaatttaattaaaataacaacataaatccagaggaaattaatgcaagacccacaaaacgagatccgacacaaagctaattagagtgtttttttaagaaaaccctaattaatgtctgaagagattcttaaaataaatggtgttttgataaaagcctcaagaaatgtttcaaccatcacattaaatgaattccacatgagtccaagctttctaatccactctttcccaagtgaaacttctctcttttactctcatagctttccttggctccttcttatttatctcactaattaatttcatttttactaagtaatttatctcactaattaatttacagtttctactttacattttccattagaataaatgatgagcctatactaatttccaaatattgcagttgtcacgaatatataaaatcgcaatggctaaaatatacacgttcaacaaaaaattgaacacctgacctaaattggtactatcttattcaagaatttcgacctttttagttaaaataaaaatatatcatctaccaagaaaaacatactccataaccctagaaactatatatagtgttagaaagtggttatgattcttaataatatatcaaattcatgtgatgcatctaaggaatgtttttaaccccaaaatagcggggacatgcatgaaaaaaccatttgactagcttgtgaccatcgcccacaataatctctacaaacttattcgcttgatgacaagcataatgtttcacatattttatgtatatattaattaatgagtagttttattcacaaaattatcaacttgggtgtgtagctaggcccccacaattaatgtatgatgcatcagatttatctagaattgtcttactgcccctccaaatcgatatcatatcaagttgtattaaaaaagaacatgcatctcaagattagtttaattcattatatttaaagtagttcaacctaagtgactaaatcacaatcaacccctaacgtaactaagtctacaaattaaaccaacagtcaactacatcttttttttttttgggttgtaagtttaaatttactaatcaacaaaataaatgattatataaaaaagaactacaatttaatatttatgatcagcatattttttctaatgaatttttaaatagttgaatgaccaaatttcgatatatctaccaacatcgtcaattgatgattttttttataactaattttcagtgttttatttctaacttttactctatgtttttacggtaagattagaagtgtcaagacttggatattattttgctttttattagaattagtaaatataaggaaaacagaaagctaaatttttttaaaaaaagctaactcggtatttcttcttcatttttgtaacagaaaaaccccacaaaatttgtaactatgcaaagtccgagtggaaatataatttgagcttaggatcattaaatccctatatagttaattagtactaaaaggaattatagaaaagaaaatgactcagttaataggaccactctagaggaagaataaatagtttaggtgttaatggagggatatattttagaattagaactgtcacattgggaagtggttcttcttgctaatgtattttagaatcattcaaaagaaagaagaactaaataattctctaaactaaacatttaatcaaaattttagaagacaaaaaaagaagaagaagagagaacagacatctttgggcacctcggagaaaaataagcatgtgagactcgatgcacatcattaaatgctttgagatgacatggaagattcggttctcggtatttgctcttttgtttctattttattttcttacccaaagaaaaaaataaaatctttggaaacggtgggggaggagacaagaagcaatgtttgactgagttcagttaaaatttattgaagtctcttttgtgttgaagagttgggacaaaaaaaaaaaaaaactttaaagacctgagggtttggtttttgcttaaactttagttgaatgagtgaaagaaatgagtttctgtttatgtcggaatttaataagtctgtaagattctgtaagaaacaaaaagaagcaatctgaaacatcagagcttcgtgctaatccgtagacttggactctagctcttgccgcctcgtcttttcttattttacagttttaactctaccttcgatatcaattagcatatcattgattatcactttctgtcagtaaaaacttgtatatcgttagaaaaaacactaataaatgtaatatttggcgatacaaaattagattgtataggattttgtttttctttttttcaaaaataaactatttattagaatttccaacttagactatatagtttcataatcaaatttacgattactttttgttttccatatgaatatgattatatatttaagaatgttaaagaagactaattttttcatttattccggtttgtatataaataggttaccattagatatgtgttatcttggagtactctacaaatattttctttaccaattgaatcatttcaatctaaaaaaatactgaactaatgtcattggtgctatttataatttgacatataattttatttaattgtaaaatttaaattctaatctttctatacaaaatttaaacaaaaatgtaattaatctcgtttaattgtaaaatctaaattcaaactcttatttataaacacataatttatatttaaattttgtttaattaaaagtaaatagattttgaatatttaaactaatatgaatatttttaagatgcacatactttttttttttttttggtaaggtttaagatgcacatactttctctaggtatctagtaatttattccttcaacgtctgaatcggcctcaaattttctgatttgggcttagtttggtccaagtgggcttaatcaagcatatcataactgtagtttgggctcataacgttttttttttttttttttttttgcgctgcgcagtttagcttttgatggtacggcttattttaacaacgaactcggaataaaaaagcttttgacagagagaacgaccataattcaattagggaagtactttcacaaaccggagaagattatcggagatcgcaaactatggccggacgagatcgttatattccatcatcagcagtttcaacttcatcatcttcaagattattagaatctcaattaatcgaatccgatcgaaatcgagctcgatctgtaatcctcgaggatcgaatcgcaatccaacaccgtgaaatccaatctcttctcaacgacaatcaacgattagctgtagcacacatcggactcaaagaccagctcaatgtagctaagcgtgagctcgaacggttacttgaaaccgctgttaaagttaaagcggaaggagaagctaaagtgcgtgaggtttatcagaatgcgttgagaatggaggcggaggctcgtgtgattgatggacttggagctgagcttggtcaggttaggtctgatgtacagaggttaggtagtgatagacaggagttagctacggaattggctatgtttgatgatgagatggctaaggctaaaccgaattcggatcgagctattgaggttaaattggagattgagattcttcgaggagagattcgtaaaggaaggtgaaaatttgaattctctttgttgtttttgttggaacattggatttgttatcttgtagtgtatactcatatgatggttttttggatgcttatggagtagtaatgaatttgtttgaggtttgggatatgaaacagggctgctcttgagctggagaagaagacacgagctagtaaccttcaccatgagcgcggtatggagaagactatcgatcatttgaatcgagagattgtaaaacttgaggaagaattggttgatctggagactaaagctagagaagcaaatgcagctgctgaggcagctccaaccccaagtaatttctctgtcttttttagctttttgctttacacagtttaactgcaaaaccaccttatagttttgatgatttgttgatgtaaggtcctggattggctgcaagttatggaaacaacaccgatgatatatatggaggtcaaggccggcaatacccggaggctaatggtactcatgaggtacacatgagtctatagataagtagtaactttacgtgatcatctgttagaagttctcctaatttagcattattatggagaaggagaagattggactaattgtttgtaatgattggcataccaagttctgattgtcttacattctgaactgatatcttagcaaaatagctagttctcagggaaaaaagttatgttcataggttagtaagtgtccaacttgtacaagtatccgttggttagtgagaattgttgtaaactcataattgactgaattcaacgcttatgataagattgcggttttactttaacattgttcgattctagtagtgtttaacatcacacaaatatacacttcaggcatatagagcatcggattgtctctctcaagacccatctactccattgcagcatcctctgaataatactcaacattctagtgtgttgtgatagtgtcttgcttacgtttgaataggccagccatatacttgatttgacaatttttgttttagtgtatcttatttagcgagtgtattcaaccaaataatttatttgattgaagttcgaagaatttttctactctgtattctcagttcgatttttgaggtttacattaatttacatacctcatccaactataaacaaacaaggacaagagtttgtggtccttttagaattacaaatttttaaaactattccatttgatttgtacttaccaacatattaaatttgaatatataaggtatttagacagacatattgatggttctttgcatgaaaaatctctgctacattttgttagtgcattatttctctacaatttcttgaataccaactgtttgaaagaataaagaaaaaggcagagtgtgtttgttctgttccatgcaacctcttacacactcgagttcatcctcagtcacgggcaaacaacagttgatgcaattcctctctggcaaatttctccacctttacagaactaacttcacttgatttgtatcagtagctactgatacaaatcaatttgcaatctcctcctccaaaagttgtaataatgggtgctaggggataaaaagaaagaacagaggcatacatcaaaagctagctttatcaaaccacatgcacaaagtttactcaaatcaatatcagaatcagaaaaacaagcttaatcaacaagtttacattaaagtgtttccttatcatataagaaggggattcctctttctttttcccaagccttcacttcaatgattagatcttcaatcatggcttagaaaagaaacacaatactatcatcttaagtctttgttcattacttcaaaaagagagggtaatagggttacgcgtataaagactcaccaggaatttgcatgacaagactcttagcacgttctaagtgttcgtactctcctcttacgagttacaagattgaagaggtttccatcctataaagacgatcaagaatatataataagaaatgcttactttaatcaagtcaatcttctcttgatgtatcacaggtcttcacctaccttttcgtagtcacgaagccatttttcttcttccttagcttgcttccaggtttcaactgcatctattatgcctttccttcttaaagcttcagattttgcttcctcatattagcatccaatgcagcaccaatatcagatagagcacgatcacctgacaagataacttatcttttaagcatatctaaattgctgtttttttcttacaaatagaagagttcttcacttaccctcattatcagttagctcaatactgcctgtcgagctcgacaaaatgcctttaactcgtattgcttctgaagtacattcaccttcagggtttccccagttttagttttctttgccactttgtcagccttgtctttattagcaatcctcttcgttttgggagcaccagtggattcctttcttttaccagcatcattagtactcgtcttgggaagatattttgcacaactccatttttgttttttcttagggtgatgaatgacttggcctgaggtgagaaattgagagtgtagagacttttgcctttgtagttatactctgccaaactccatccttttagccaatcatccacaaactctatgggtaaatcatcatgataccttaagtaagctagtttagaagaagtgctcacaacttcttgacccatttgaaactgatgaacatagtaattgacactgccccactttataagagcaccattgcaattaaaatatccaagatgaacatttttagttggataaaagaagacccacgacttgttgctttctccctctagaaattgaaagttgatgaaatctcactcccatggactgcgatcaaatatttcaagatcgtctatccatggaattgcaacatcaactccaaaatctacacttttaaccaaactaatcataagttaaatttcaatttacaatcgtttattaatatagtgattaagtaagttatcaagtattaatttatagagttttatttttgtataaactaaccacgagttaaggaggtgttattggtttatgatttcaaaagagttttagtgacttaaagtatcatgtagaatctgttgttatttaatcaaaaaaatttaaaagtatgttaaaagtttgtgttattcattaaagatttgtaaaaagtaatctaaaaatcttcataaattttagattattgaattcatacttttataaagtcagtaaattttttgtgttattctattaaaacaaaaaaatctctgattgtttatgatttaaattattatgttattggttcatgactttctacattttctttcacaaaataaagtcatagaaagtcatgaattttttttcaaaagattgttttgagaaactttagaagaaaatgtatttaattataatattcatagctggaaattgatctaatatttaattataatattaaagtttccagttatccaaaagaagatgtgagtttttttgaacttggtaattaaaaaaagaaagcaatatttcagatttaatacagattcataagaaggatccataagaaattaactaaaccggatctggtcttgaaatagtgacggacgcgtgtcccccggtcagagagttgccgtcacaatcacgcggagaaagagcgacaaatcaaaccttaaccgttaaaacgtcatcgtttcatatccccccacaaccgaacccctttcgttcgcccgtctctcttaaataaatcttagagatttctgcaaaattcgtcacttcaatttcaattttcagatctcaaaaactttttctcttttccgattccaatcttctctcgtctgctttcctcaaaggtacgttttatcttccttctcatagcttccgaagaatcaatctagggttaggtatttcaattctgatcggattttctctcttcagtgttctctaatctaatgggaatttcacatgttttctccaggttttttcatcactttatgcttcacaagcgagctagtgaagctaacgataagaacgataataccatcatcggttccgatttagcatcatctaagaaacgccgtatcgatttcactgaatcttcgtctgataagtcttcttcgattttagcttctggtagtagcaggggttttcacggcgatagcgtcgttcagcaaatcgacatggcttttggtaattcgaaccgtcaggagattgatgaagatctgcacagtcgccagctcgccgtctatggtcgtgagactatgaggcgtctctttgcttccaatgttctcatctcggggatgcacggtcttggtgccgagattggtatgtacttcattggttttatgttgagattgtggtctccctcgtctctttggtttttgaaacttgtagaaacactgttttcgtatgcgtcgttattagaagctgtgaataattgtgtcatcttcaaagattttactctttagttgttttgttttggttctcctgatctgtgattgctggtattcttcaacatccaaatcttagtagcttcctgatgttccttagttgttcgatatctttgttattggggtttcgttatatgccagttttctaagatgcatggtaaatgtgaactgttaatgatactttttagtcgattgctttctcattcagtttttgttttatttgttgattttcttcagccaagaatcttatacttgctggtgtgaagtctgtgaccttgcatgatgaaagagttgtagagctatgggacttatcaagcaactttgttttctcggaggatgatgttggcaagaatagagcagatgcttctgttcagaagttacaggatcttaacaatgctgtggttgtctctagcttgaccaaaagcttaaacaaagaggatctttctggcttccaggtttgtagacaactcatttgtcttgttattggttctatatggtctgagtcttttgtgtactgtatcgttctgtagattacttgtgagtttatgataacactgtaactgaatgagtaacataagagtgggttgttctattttcgttgcatataagagatgggttttgtctcatttagtgttaggctatttctagtgtttattgatattgatatggaagattggtgtacacttttctcattggtgtgtgtttcttgttggcgggttttacgctgatacatctacttttgtgccaaacaggttgttgtattctctgacataagcatggaaagagcaatcgaatttgatgactattgtcacagccatcagcctcctatcgcttttgtcaaggctgatgtcaggggtcttttcggctctgtcttttgtgattttgggcctgaatttgcggttcttgatgttgatggagaggaaccccatacaggcatcattgcgtctatctctaatgagaaccaggcatttatttcctgtgtcgacgatgagaggcttgagtttgaagatggtgacctagttgttttctcagaagttgagggtatgacagaattgaatgatgggaaaccaaggaagataaaaagtacacggccatattcattcacccttgatgaggacactactaactatggaacatatgtgaagggtggtattgtcactcaagtgaaacagccaaagttactgaatttcaagccattgagggaagcgcttaaggatccaggggattttctatttagtgatttctctaagtttgatcggcctccactccttcacttagcattccaggcacttgatcattttaaagctgaagctggcagatttcctgttgctggctcagaagaggacgctcagaagcttatatcgattgccacagccatcaataccgggcagggtgatttaaaggtggagaatgttgatcagaagcttctaagacacttttcctttggagccaaggctgtcctgaatcctatggctgcaatgtttggcggtattgttggacaggaggttgttaaagcttgctctggaaaatttcatcctctcttccaggtaaaatttcttttctatagacttgtgagaacacatatttagtctttgcatgccaagttctctgttcgagttaagaattttaaacactagaatttaaactcaaagctctcttttgttaaaaccgaatcaaagtaacaagacagaagttgaaatacacccaagagtaattaattcctaagctctcttcatccctatgtaatatattagaagctaaatgaaagctgtttagataaagtaaataaagaaatagaaattctaatgaaaataaggaacattatctaatacgcatctctcctttttcctaatgttttatgttgtgggaagttacagctgtttcctctttttttgatacatttatattgtttaaagtttcgtattgggatctgatgttgtgactctttttgtttatcagtttttctactttgattcagtggagtcactcccctctgaacctgtggactcgagtgactttgcaccaagaaacagccggtatgatgcccaaatatctgtatttggggccaagttccagaagaaacttgaagatgctaaagttttcacagtagggtctggtgctcttggctgtgagttcttgaaaaatttggctctgatgggggtttcttgtggaagccaagggaagctgacagtgacagatgatgatatcattgagaagagtaacctcagtcgtcaatttctgttccgtgactggaacattggacaggctaaatccacagttgctgcttcggctgctgctgttataaatcctcgcttcaacattgaggccctgcaaaaccgtgttggcgcggagactgagaatgtatttgacgatgccttctgggagaacttaactgttgtcgtcaatgcactggataatgttaatgcgaggctctatgttgattcgaggtgcttgtatttccagaagcctctccttgagtctggaactcttggtacaaagtgcaacacacagtcggttatcccacatctaactgaaaattacggtgcctcaagggacccaccagagaaacaggcccccatgtgtacagtgcattccttcccgcataacattgatcactgtttaacttgggctcgctctgagtttgagggtctgctggagaagactcccgctgaagtgaatgcatatctttctagcccagttgagtacactaactcaatgatgagtgctggtgatgctcaggcgagggacacattggagaggattgttgagtgccttgaaaaggagaagtgtgagaccttccaagactgcttaacctgggcacgactgaggtaatatcactcttaatagttagttagatagtctagtcgtaatatggaatgaaatatagtccggtgtcttactcatgtcctgctacagtctcctattttatgcttttgtcatgtgcttcatcccaggattgcttaattattcgttgaaaacatcattacgaaactaaaaaataaaataaaaaactaggaacagtgttataaggtaacttcatttcacaacaggtagctacaaccaatatgtagaagtgggaataaatcgtttccttcctctgtggagtctgtgatttttgcaataatttatgtgtttgttatgttatgtgactaggtttgaggattactttgtgaaccgtgtcaagcaattgatatacacatttcctgaagatgctgcgactagtaccggagctccattctggtctgctccaaaaagattccctcgtccactccagtactcgtcgtccgacccaagtctccttaactttatcacagcgactgctattttacgagcagagacatttgggatcccgatacctgagtggactaagaacccaaaggaagcagcagaagctgttgacagagtgatagtcccagactttgagccaaggcaagatgcaaagattgtgactgatgagaaagctaccactttaaccactgcttcggtggacgacgctgcagtcatcgacgatctcattgctaagatcgaccagtgtaggcataacttgtcgccagacttcaggatgaaacctattcagttcgaaaaggtatattaccctccaatgttatcgtcttcactgatattgacttgtcttgtttacaatttttaactgagtgttgtcattttgaatttgatgtgtttgtaggatgatgatacaaactatcacatggatgtgatagcaggactagccaacatgagggcgagaaattacagcatccctgaagtggacaagctgaaagcaaagttcatagcagggagaatcatcccagccattgcgacttcaacagccatggctactgggctggtctgcctcgagctgtacaaggtccttgatggaggacataaagtggaagcttacagaaacacatttgccaacctggcacttccactattctccatggctgaaccacttccaccaaaggtggtgaagcaccgtgacatggcttggacagtttgggacagatgggttctcaagggaaacccaactcttcgtgaggtgttgcagtggctggaggacaaagggcttagcgcatacagcatctcttgtggaagctgtcttctgttcaacagtatgttcacaaggcacaaggagaggatggacaagaaggttgtggatctcgctcgggatgttgcgaaagtcgagttaccgccttatcgcaaccatcttgatgtagtggtggcttgtgaggatgaagatgacaatgacgtcgatattcctctcgtctctatctacttcaggtgaaaagtttcgagagaatgaagaaagatgaaactcttgagagcaaatttgtgtgttttgtctctgcatctgccctacgttattatcttttggatgcttgtgggtgagataactgatttttacttgagggggatagagactcattttatctctctcgttctattttagtctttctttctatgtacaattgctgaatgtgtggtttacacacccgttaccttctaaacatgttctatcaaacaaatcttcgagtttttcggttttttccatgtcttcttgcaggtggtgtttcgcgataagaatccgaaagatataatctaccttaaataatatccactctgtgaatctatttacagagaacaaattgaagcaaagaactaaagatataatctagggtcaagtctcgagcaccaccttctcttaaccccaacccaagattctagactcaaaagctgtttgcctttacttcctttttaccggttatactgactgactcggctatagaattgatgagcttttttaacaataggtatcgtagttttcgtttattcggtttcattgcataaattttggattcaatttgagagtggttcaatttatttggtacactacaattcaaattggagtaagcaaacaatatataggcatgaaggagaaagattttttcactgaaagtgccacaaatatattaagagtactgacgattcgagactcgacttggcttgatcaccaagatttatcagcgccttcgtcgaattggccagatcccacaacacgaaaatcaagctgcttttgatgcttggtacgtcttctttcatcaaaatcatcatatccctcgaactgtcataatacaaatatccttgtttcagttcagataacgaagaaagaactatagactcaaaacatgaaactctgaacaaacaaacctggcggagaaattcaacggttatctctgtgttgtggagacctaaagttgagagctgcaaacacatcttaaataaagccgatggcagcgtcttcaatcccgtgttattcagctccagcgtctgaataccgaaacactaagtcagtatttgtaaacccatggccatggaacaaagagtagtcaaaagattgttttttacctttagattacgcagtttggtgaatgtctcgggaagttctgatataatattagctgaaagatcaacctccatgaggaatgaacagtttccgatactctcaggaagactagttattctgcagaatacaaaacgatggagagaccatgagcaatgtaatcaatgaatcacaatgctacgactgaaacttttgtgttttcgatcaattaaaagatatgagtaaagcttatttgcctgttgttgttggctttcaaaatctcaagctgcgtcagaagtcctaactcattcggtagacttgtcaacttgttgttggtgacatcaagctgtctaagagacgtcagtgaacccattgctgatggcagaacagttagactgcaacacaaacaaaagcccaaccaaacaatttccccgtcaaaaatcattcggcgttcacaagtataaatgttgtgttctagagtccaagtgattacgatttacgtgtaacttcagcttcaaatcaatttttcctttggtttagcttgtcgaaaaacattgaaggcatgtctgatatatactaagaaagacagttccaagagtgaaagcgaaaaactcacttgttatggctaatggacagaagcatcaggcgcttcagagatgctatcccttcccattgaatggattcatcggacagaccatttccttgaaggaacaatttctacaaatgctcatattatagtcatatcataatccttaattctacactaaacagaaagatttaaaatatacatgaaacttagcagttctcacctgcatagaaccaaaggagctgattttggcaggtacttctttaatgaagttttcactaatgtcaagtactctgactccagatccacagtcccacacttcttcaggtatttccttttccaaaacaaagaaaactcaactaataaacaatctagctactaacaaataagcagttatgagaaggtagtaatggcttgtccttatgtttaacgccaagtgatataatgaacacacaaagaccttctctatataccttcaaattggcttgagctaaagcaataactcctgtggctttccatcgatcagtgcggttcttgtctacaagtacactaggctttctctgatctactttatcagatacaacagttctagagattggccttatactagcttccttaagtattggaccttcctattcattttgaatacaataacaacattagcattgatcctactaaaaagcaagaatccaaatttctagattatctttacacaactctgcaacatactaagatattgaataagagaagaacactgaccccttgatgcagaccttgagaagccattaacatgagtttagctccacttcccacatcagattgtttcaaagtcgacgtttcaaccaaaaccttaccttcaagaaacaaaaatcagattttgaaaaatacccattataaggaatcagctcaatcagtgaaaagttattggaattttaaccatcaaacctttgaagatgagcttctggccacgaggaagaacgttggtgattggttgtaactgagacttaagatctttgactgtacaatctggtgataccgaaagtggtattgatttgcctccgaatttgactgttagcttaatcgtggaatctgccattgttggatcttcgagctccatcacaattttacctctgtgattcttatttcttcctccggctttgctttcaccttcagattcacttaatttcagaaatacgtacgaggaaacagatgtcctcaagtcattaaggtttgttttgggctcacaatatttaatatataggcccatttaaaaacgtgggccgttggaacttcagcatatttgagacaaatattattgtttactacatacagatttatatacacaaaaatagaaacttccgatccctccatcttagacggtgtctttagacttgtttctcagctatttcatactctttcctctttttttatcacatcatcttcactatccacaacttatatttatctatgtacatatacacaagacaaggccctaccaaaccagcgtcaaagagcctcttgcacagactcatatatgcttcaacatctctcggccgttggatcttccttgtcattccttgcatcacagccactcgatcaatatactccggatgcaacccagagtcgatcatcgataccaatgtctctgcagcctcttcgaagtgccctcctttcacataccctctgagcaaccatgacagagtcttcttctttctctgagatcccatgaactcaactcgtgtcagtagccgagaaactgcattaacctctttctgtgaagcgcagatcgccataacaatgtcgtggaggtcagcttcaggttctctccctgcaagtttcatcttccagagctgtttctctgcttctggtccacgtcccgcacatatatacatagcgagtagcctctcatggaccaccccaataatggaatcattttcttggccttcctcaaccgcccaagttgctaactgcagtccacgagataatgtttctgattgatacttctcaatgagtaccctatcgtgatcatcaatctcagcaacaaaaccagcccgtgcaaagcgtttcaactcgcgtaatgtctttccaagactattcagctctttcactatagctgtcatcgcaataagatagctgtacgcttctggtttcagccctgaaagtcttaactccataaccatatcaactgccttcctataatctccatcaacctattagaagaaacaaaagacacatatccacatcaacaaagctagaccaagaaaccgataactaacaagaaggtataacaactatagtcatcttaaccacttcatatcacatctttttgatctcaaatccaccaaaattataaaaaaaaataaaaactatgaaaaaagttcaaaactttaccataaatttccaagcaagatacccaacaggtccaccttttctaccttcagaaccaccaccaccaacaacactataaccaaaaccatctctccttcttaaaacctccttgacaaacaaaaccgcactttctttcttccccatctcacaatacaaagcaataactttgtccatcatactaaaaccaggttttaaaccaacacaatccatctcaatcaataagtcgaacacttggtgtgcattacattcatcttcaatcaatttcttaacccaaccacacataatcgaaaccattaactccattatctcttcatcaactctattctcctttttcaaccattcaaacacttctaaagtacaccatgaatctctaccttcttgtgcgaagtaaacaagcatcaattgcaattctctagaagataatcgatgattcatctcttcgagtatatctgatggttctctagtcatcctctctagttcctcaatcgcttcgaaaaatccttctcctatctcctctgcttctccttcttcctcctcgcttgtgatgaattggtctagctccacggaacgtgatagtcccatctcgcgaaattttccagcagagtagtttagtttcagattgcatatgattcgggaattgggttttacgctgtggtttcgatgaagtcgggggaggaatcgtcggagagaaatcgtcgagatagtcaacgaagcgaaaacatgagcataagccataactaagttttctaattccagaagagaaaaaatcgaaaggaagagaaaaggtttaaaattgcttcgggaaagtttcaaattcgaaaaactttgaaactcagaacttcaaagattttggtgtgagtgatttctcgatagccaccatgagagtagaagctaagataatccatgaaattaaaagcctttaccaggaatgaagaagacaatgaaaggataacagaaccaaattatttattttattttctggtcgtaggatttatttaataaaatgaagggttaagattgagtgagctttcttaatccaacggtgaatagtctttggtttgaagaaagaggctactaagcggcttacgtgtcatggcgtcaacttatttatcatcgtgccgcttcaaagctcccaacagcacaataaccttgaattacgtttataacctcgaatataactagtggactttgttttgatgagtttttttaaaaaataaataaatttaataactagtggctgttgaccgttaaagcgtggtaaacgtgacagatttatttatgggtctatctgggctacgttgggctttattaatgtctttcaaggcctttcatggactctcaggtgagaaagcttaagtatcctgtgacccaaactagactacaattgaacttatttatatatttattaatttgtaatttattaattaattaagaaataacatactatattaatttgtaatttataaagaaaacctgttaaaagactaaatctgcagttgtgataaaaaaaaaaaaatctgcagtcgcactgaaaattatgtgacaattactcaaaatccagacaattagatatgttaatcaaatctcctatatgtgtatatttcatatccgagaatattgttctccactctaaacttgtgctccatgtaaagtctgttgtggaccatcactcctaaaactcaacaatgttaagaaaatacattgcatagatcataaatggtaataaatcttatatttaaaaacatttttcaaatgctcaaattaaaaagaaaattgctaatctatattgagttacgtattcgttttggctttggttagttaagttagtgaagatatgattcgttctgtacttcttctctccactcccaaaacatctcccaatcatattattgtataattttgcttttggtctgccaacttttattttagtatggtaacagaaatggttagttcataatttccctacttgtattttttttcggatgaaaagtttatttctatttgtttaaatcacatattaaagtactctttaaaaagcaagaaacttacaaattatagttacaaggtatgacaaaagttagtttaagttgcattgtcattcaatatattcaacacatttctctgaaattacacttgacaacgtaccgtgtccacaatcaacggatctaacaattcatagaaacacaatcaatatggaactttgacaaacaagggtacgtggttcaatatacaatcaaaatagcaagaaattatcaacatgggggatacttaactacgaaaattacattcataatctacataattatatattctgatgattatatcaagctaacttagaaatactaattaatcaaaatagtcaaaatggaaaatatgtatctttgaactggttaggaaaagtttaatgcgaacacgtgattatcacaccctaacaaagatttgaaattttattttcaaaatgtgaaattaattactaaaacaaaattatgcatgtctaacaacattagtcaaatataaaattcttttagatggtaaatttataaacttggaacaattactatcttattaaaagattgagtcaaagtatgaaggctagtttgccaaaagtaatagtagtatatgtcatttggaattaatattaattaaatttattctgttactaaaatcttatttttagtctacaaatctgagagattgcacataaattgttatcctagaatcaatgaagttatagtaaactttttatgaattttacaactaatatacaaaaacataatgacatatccatatatattagtcgtcctgacactttaataacttccatattgtgtgtctatttataaggtttccacattataacataggatgggtctcctccttgtatgaattgttatccctcttctcatttcatttcccctataaataaagagaaagagaaagagaaagagagagatagagatagagaatggtggggcaatgggaagaagaagttgatgaagaggtggtgatcagatgctacgatgatcgtagggacagaattcaaatgggtcgtatggagaagagttgtgagattggtcacgaccaccaaactcttctcttcactgacactttaggtgatcccatctgcagaatccgaaatagtcctttcttcattatgctggttaatttctcactctctttttctttctattctcttcaggattataccttaatttttttaaaaaattatatccaaatatgagatggttctcttctttcaaaagtacaaaaatttgattaaagaaaatatatttacattttgatcgacacaaatatatatatatatatattcacgcgtaatatatatattttccttcgtgtttttaaagagtgttatgaaatcacatttttgcttgaatgtgcttttaaatttcctattaattgtatagttttactagatgagctatattaaatagagatatggaaaaaaaagtgagatgtattaacatgtcatacatctttattaatctctataaaatgtaaaacatcatctattaaaaatataggtgataaactactttattatgtaagatactgtatatagttgttgtttttggctatacaaacatttatgattctataagccgaaagacgctaggtttgttaactttgaaatgtgttaatttatatatgtatatatagtaatacggcttattaagtgaactactgttgggattgatataaataacgtttatcaaattaattaatgtaacttaattaataggtggcaggggttgggaacaagctggtaggttccatacaaggctcagtaaagccagtggagtttcatgataagtcagtgagagtgggttatgtcctaggtctcagagttgtgccgtcgtatcgacgccgtggcattggatcgattctggtgagaaaacttgaggaatggttcgagtctcacaatgctgactatgcttacatggctactgaaaaggacaatgaggcctctcacggtctcttcatcgggagacttggctacgtcgtctttagaaaccccgcaatcctggtcaatcccgtcaaccccggccgtggtttaaaattgccttctgacatcggaataaggaagctaaaggtgattttattacacattgcattagtattaaactctcattgcgtaatatatattttaaaaatcaaccataccacaataagaaagttaaaatggagttggtaaaatttggaacgtttcaattcggttaaaattgcgtaatgtgttatattttgagtctcttttaaaatgtagaatagataaggaacactacaaacatttttctattgcataaaattaacacactaacactaaccaaaaaaattaaatgacaggtgaaagaagccgagtcattgtaccggagaaatgtggcagctacgacagaatttttcccggacgacattaacaaaatcttgcggaacaagttaagtatcgggacatgggtggcttactacaataatgtcgacaacaccagaagctgggcaatgcttagtgtttgggatagtagcaaagtcttcaaactaaggatcgagagagctcctttgagctatttgcttctcactaaagtttccaaattatttggtaatttcttgtcattattgggattaacagttttgcctgatttgtttactccgtttgggttctatttcctttacggggttcactcggaaggtccacattgtgggaaactagttagggctttgtgtgagcacgttcataacatggctgcgttaaatgatggttgcgcatgtaaagtcgtggtggtggaggtcgacaaaggaagtaacggcgatgattctttgcaaaggtgtattccgcattggaaaatgctttcgtgtgacgatgatatgtggtgtatcaagccgttgaaatgtgagaaaaataagtttgatttgagtgagagatcgaaatcgcggtcttcgctctttgtggatccaagagaagtgtagctagatttaatccaactgataatgtacctaatagcaaaatatgcgaaatcattttccgattttataagattaatgactatagacatgaaagatgcaaacccattaatccgtgactatttttggtgaaattatgttttctacttgatggttctggtatgtaactatgtatactaccattcatttttattgattcttttgttccgtaatttaacgaaaaaaactaattgttagactacatttaagagattgtaccgccaaaatgatatgttcaatcaaatgctaaacacttgcatgttaaatgatgaaccggacaaaataaatcaacgatcatctatcaacaaagaacaatcaaaccatcgactcacaaaacgtcaagataattaatatatgaatccaagacatgttgtggggtttgagttcgcattttgcttggcatgagatatcgagatcatgaaccctacatatagttatataattatgatttttgttttatttcgggatctaatgtatgataaatcattgttctaaatattgtatctaaaaagatttcctcaagtaggtgccaccatttgttgtccttggcattcttcctatcttgtttgagctataaagtagttaaagaatagtcaattttcatatgttttttatttaataaaaatgtatttttactcgaaatcattgttaatcgtaatttgtaatgttcatatttctcaatattgtgaaattaatacgaatgaaattggttgtgcaggtgatggtggtcttttatgtcccctttttattaggttttaaaccgaatttttattgatggaccgtcctctatttgaataatagatataactcatttcctgattagtcgaattactccatgtgatatacatatggctcgcacaaatttatgtacatgtacatttatgtgtgtatatatatttagtcttactaaattgagtggagggaatttttgttgtagcttttttgttttctttttaacgtcaatatgcagatgtatttaaaacatgttcatgcagccaaatttgctttatggtaaaatcatatatatactctctcttttttttttgtttaagtatttatcttattttattatcaccgatatagaagattgttcttatttcctttgtttcatataaactatattttttaattgatatgtgaatttcctcttcttttctatagttcccctcttcattttcatttataagttaacatataatatcatggatgatgtagtacttaattataatgaaatgataaatttattggagctgaaaaaaaaaattgggaaattatttcatagactgagtttaatgatattgaaattgaatttgatgtcgtgatgtactactgatcgattttaaatacacatattatataaaaattatatattatgaaattcacatataggatgcacaataaatattttttcttagagttacatgtatttatttatacataaagaggagaaatctgaatatatttttcttggttacaaagtagctccatctctgtagtccactcactgataatttacttcatttttttcattcttttaaacaactgataatttacttcacatgttaggaacatgtcaacttcattagcagtatgaagttgaataacatatctaatgaaatgttaatcatgcaatcattagatataaaatccacagttattaaatacttactaatcacacaatcgttcaattgtgtttatgtgagaggattcaaatcagtagtcatagtctgagtaccttagaaagataaagcagcccccagttaggtgttgatgtcctcttgccaaactaggaagctgatgagtgtactttatctgcccccatctttctgcataagtcgaaccaattattggttcatttttctcatttttttatttttattttcaaatagtttggggcaaaatattaagtggtgacacaataaaatgtggtgcattgccgtgtgtttcaaccgtacgatccgaagtgtttttttcaccattctcaaaattttgtggtatttgttttaggtggtgctgcgttgcaggacggtgatattttcttttttatatgttttgtgaaacgcatttttaaaattgtacatgttaacttttatcaatcaatataagattttggaaagatataattgttttggccatttaaaatgataagaaaaaaacaaatattcaaagtttgataatcatttatatgtgcaccacatttttatagttaccgtttaacttttgtttcacctgctggttgacagacggcactatccaacatatgttagcttgtttcacttgacatctcgtttgtttcatcaacatatatcgactatgggcgaacctcgaacccaaactaatcttttcggtgagtatatcttttgaattccatgttcataatgggttaatgggtctaaaacgtgatacaatttcgacttagataaatagaaatgaaacggtaggaatcaaaattgaaagggagcaaattgacgtcatatcttttagtattttacatcactactacttcgttacttttcaattttacattataaataaattactttttctgaacaaaataacttgttatatttttttcgaggtattttcacgaacatagcaaaagcctgcatagtggtaatatatacgaacaactaatgaattctcaaacaaaaatccaaacactaaggtttcgaatagagatgtgctgtgataataacgtatatatatacagaaaaatttgttactattggaactgcacagtctgaaccgcatcgtgcggtttggtctccaaatactagattaaaacgtgagatccgcaatacgtggtaaaaaaaaatattacaaagtacggaacctatttttgctttgaattgatatcacttttgttgggcttaaaagttgaaactaattggttgggaaaaggtccatagggcgatggtcaaagctcaaacacagaaagtaaaaaggaacacgtaccagtctaacttcatagagtgggcattgtgtaaccgaaccaagtaaacccaaactgatcacaaatcaaactgaaccactaatccactctgcttagttgagtattgttaattaaaagatgataactcctttaattcgataactactaataaatcctttgatggtttgtattctgtaaaaataaatctaaccgaactaataacatcaagcacaaacatatttgggctcaggctactcagtcataatgggcctttaaacggcccatactaagtcagaacaaagagcaagtaatctcaaaatgtcatcttcttcaaagaaagcaaaagaacaaaaacaaaaaatggaaaaagaataagtttcctttaaatttccccaatatcaaaaatggaagtcttactcaacaacgcacttcttttataaccgtttgacgtgtaagtggtccgcgcactaatctctctctccctctctttcttcttcttccacaaatggcttcttgcgtcaccggaacagaggcagcaatcagagcagcggcatgtagagacggcgaagaagcctctcatctaaagatagtcgccgtcttcgccatctttctcacaagcgttttcggagtttggggaccagttttactcgctaaatactttcatggtaaacctctgtacgataaagcaattcttgtgataaagtgtttcgccgccggcgtgattctctcgacgtctttagtccacgttttaccggaagcgtttgagtcactcgctgattgccaagtgtcgtcacgtcatccatggaaagattttccgtttgctggtttagttacgatgatcggagctataacggctttgttggttgatttaacggcgagtgaacatatgggacacggtggtggtggtggtggtgacggagggatggagtatatgccggtgggtaaggcggttggagggttagaaatgaaagaaggaaagtgtggggctgatttggaaatacaagaaaatagtgaggaggaaattgtgaagatgaaacaaagattagtgtcacaagttcttgaaatagggattatatttcattcggtgataattggagtaacaatgggaatgtcacaaaataagtgtaccattagacctttgattgctgcgctttcttttcatcagatttttgaaggtttgggtcttggtggttgcattgctcaggtttgtttctttcttcatttctttttatttttggtaaactagttctcacaaatttaattagtgttgaattagttaggagagaataataaatactatgagaaaaaactagttggttctgactttagacataataatattttaagaaacctagaagaagtaatagtaatatgtagatgttgacatttttgcatatcatagaatgtgacattctaatttagagcagctcatggaccatatcaaaaccataccaataatccaaaaaaccgaaccaatataacattttgtgagtttcattgatagttttttggtccttaggataaaacttaggattgatgagtggtattgtttgatggtcaggctgggtttaaggcagggacagtggtgtatatgtgcttaatgttcgcggtaacaacgccactcgggattgtactagggatggtgatatttgcagcgaccgggtacgatgatcagaacccgaacgcattgataatggagggtttattgggatcattctcttcaggtattctaatatacatggccttggttgacctaattgcattggatttcttccataacaagatgctgacgacttgcggtgaatcgggttctcgcctcaagaagctttgttttgtggctttggttttaggttctgcctctatgtcactacttgctctttgggcttagacaaaaagaatttaaggttatatactaatttggccacaggaaatagtatgaatacctaaacctgttttaacatatttgaactttggtttactttataaatatatctaattatcatttcttcattttccttcattaactgtaagtatatttacacattaaacttctctgctaaaacaactgaaaatgaagttagagctctcttatatactgtactactactaaaaactgtactgatcttatgctaaagctaagtattactctgtttagacgtaataaaccattccaacttcaagcagagaagtgtgaggaacattaagcacaacatctgttcctctgcaattcgtgctcatgaacgcaaatacaacattcactgctagtttcttcaacaccgacgatgattgcttcgcctttgcgtatgaatgtcccagtatatacgctactccagcttctttcgcttccattatctccatacattcctctttctttctccgaacactcgacatttcttcttcttcaagtcccggttcggtttcaacgaattcgactattgcagatactaaccggctttcgaagtcatacatttctctaggaacatctctgtatccatacctaaccacacttctaaacattccatactcttttggccctactctgcttatcacaaacctctcttcttctccaacataaggaacctgaactgacttcacacatacaaacactagaatcttgtgaaacgcaggcagattcgtcacgaaatgtccgaaaacagctggaactcccgtcacaagattcgaatagaccagtcctattcctggaactctaaccattcctatgcttggtcctagagaaactatccggtccatcgagaccttgttctcaacgtcgaattcatgtttctttgtagttccgtagttccatatgtacattaccgccatgaatgtcaaagagaggagaatcggaatccaacctccttcaggtactttgtagacgcatgacgagaaatagagaagctcgatggaaccgaaaaagacaacgaatgcgagaactgtaatgattctttgcttccagacaattgtcatcactaaagtcatcaaacatgtagtcacaagcatcacagaggtcacagcaagtcctgcagaaacaaagagatttaaacataagttttcaattttctaaaaacaactgaagtgatcatgatcatggtctcaccatatgcatgacccatcatattagtgtctcttaacccgatagtgaccgccaggcaaagacacatcagcatccagttaacttcagggatatagatttgtccatgtattttgcttgaagtgtgaatgatcttgacccgaggaaagcaatcaagtgcacaacattgacttatgatcgaaaacgttgcggatatgacagcttggcttcccaccacagctgcaaatgtagccacaatgaacactggccagaacacaggctctgcaaacagacttatctgacttaatcccattcaaaagtctcgagttattcgcgtactatacagattacagttaagaatttaccgggtatcgccttgtagaagctttgctgaatatcttcatggtgtttagagagaaacgcagcctcacccatgtatgcaagtatcaaacacgggtatacaaagaacgagaaagccacctatatttcagttttgttactaaaagaggattcttttcatcagaatcatatcttataaagttaaaggtcttacctttatggacagagaagagaagtgacctaagtcagcaaacatagtctcaacacctaaggaggagaataaacacaatatataagaataaagaacataaactttgataatgttatataacatatagtttcattaactaaagtttttacctgtgattgaaagaacaacacctccaagtgaaacccacccttcaacaccggtgcttctaaggaacttatacatgtaaacaggcgaaagcgcagagactatacgcgggttccattttatagtgttgtaaactccaatgctactgatggagagaagccaagcagtggagattggagcgaaaatgaaggcgactctatgcgtaccataacgctggactgagaatatcgccaccaagatgatacatgcgatgatgacaacataatctggagttgaggacaagagaaacaaaactaaacatgagacgtgaattagtatatatttgacaaagtaagtaaacagagtcagacatactctcgtgaaggttgggaatcttgagtttgactccagaaacagctgaaagaactgcaagataccaaaatgtttggaaactatactttgtctaaggttcactgcagagaagttctctggaaaatttacctgagattgttggagtgaggacactatcaccaatagccatacatgtccctaaaagaacaaagagcaacaaacacttttgagatttcggatgcttctcaaagaatgatttaaccgctgcgctttgccgagtctctcctgggcttcccgttgcatatgttgatagtttctcatccatttcttgatgatttggtaaaatgcttagcttggcatatctacaaagaagcgagtacaacgcaaatgttccaccttcaaacaaagaacacaaacgactgatcaacgtcgaaaacatacgtagacatatcataattctgatataaaggcttaaagcttttaccttctccattgtcatctgctgagagaacaatgaaaacgtatttaaaaagagcaatgagtgtaaatgtccagaagatgaaagagaacactccaaagatctcttcatcgtcttcatgaagacttagtttcccagagaaagtggtcttataaacatagagtggcgatgtactaagatcaccatagatcactccaagactctggtaagccaaagtaagaacattggcacaagacaaagtcttcaaatgctgaaacattttaaaacaaagattatgaacttttaagatttatgtactcagaaacattgagttttcataaagtatgacctaaatttaacctaattacataatcttagaacctttactctgccaatagatgtcaactacaaaaaccaaacagtctaataaaaaaaagttggacttttcacatccaactcatttctttccttaaaaatagagactttactaaatttcaaaatcaaaccttttgtcaaattaacaataacattaataattagaaggctcaatttcacaagttaacaactaatctaatatcaccaaacatgaaaagcgttcacgtctttgtttaaattccggtaaataccaaagtcgatatggttcaagcaggaggacctaccaatcctacttgggaaaacaatccaaaaatgaagcaaaaacagagcaaaaatagaacccttaatcttccacttgttcttcttcttcaaatacgaaaatccaatctcgaccacataaattcgcattgttcccaaaatcaaaaacccagaagaaaaaagtgatttttgagaaaattctcattgcaacagacagaacagagttgaaacagaacatgataaaacagaggatttggttactatgagaaacacagaagaaaaaaaaactgacctgttgagaaataccctgttcgataagagatggtgattggttcatggccgtgtattcaaaactctgcaatatttcagtttagtttctgagagagagagagagagagagattggattggattggaagaaacagagagaatataataatgtgaagagagaggagagaagttgggaagtaggaggagaagaagaaagagcgaagtgaggaaagagaggaagagagtggtgatgtgttttttggtgcaaagacgaaactttgcaggttttcatttattgctttgttctttctccttttttagtttttttccgatttcaagtttactttatacctttttattatattatttccttatttaattaaaaattatttttcgttgacaaacacttttatatttttgttattttttgaaatagtcttgtaagaatattttattaaaatgttcgacagaaacaaatatatgttttacagtggttaattttagcatgtttgcttacgatatttgttgcgttgattaaataagataatgttttgagagtttatttttgaataataataattaaacagcaaaagaaacctaacaaaaaaaggtgataatatataattgtatagttttgtatagttgaatagtaatttatcttcgatataatgggtactattagtctattgctacatcatctacctttgtaacaagacaactaatgatgggctgtaatatttgttatttagaactatttaatcttttttgttttgtttttgatgggtaaatttaccactatttaaacatgattagcactatttaatcgtgatagttatccacaaacactggcctatttaatgcaaaattacatatatatagcatagatagaggtctattattataatatatgtctaactttgttgcattggttcagtggttctacttaggccaactccaatgggactctaaaacaccattttagtgtaatttttgcactaaaagctttccaatggaactctaaaattcacaccattttagtgtaatgctacagtgttacatcaaatttggtgtgatactattcataactctaaacactattcacttattatatcaataaaaattcaattaataaatataaaattacaaatgattaatagatataaaatataaaaatgaatggatacattaatatattatatctcttgaaatagtttatttaattatgatatttttatattattatgtatgaaaatacttaaaataattacaattttatgtatttttaaatatatattttaatatactatgtttataatgttatgtaatcctatactaataataaatactaatcaaaactattaaataacaaaaaaaatcttttaaataaattatataataatagattctttttttagtgtgatttttggtgttatggttggatagaacagaagttttagtgctaaaaatggtgtaatttgaacaccaaaatagtgtttagccttggagattcctttagtcgacataaatatatcgtaatggtgaaaaatagtatgcaggatatgttgattggtaaaagtgagcttagttaaatgatgaaattttttttcaagtttgttcaagtgaagaagcaaacctacgtttttaaattgtgattctagaattgggtaagaaacaaatgtcagtccatacttatacgaaagactaactattacaccagttattattatgttaaatagagataagttcataaaaactagagttacttttaggtttctattaattttaaaattcaaaacaaataagatatagtaatgaatatgtcagttagtttggctcatcatggtttccgtttttgtttggagtcaatttaaggtgaaagaaagaaaaaaaattatttgtgagatttcattaaaattaaaaccttattctgataaaggggttaagtaaggtttaaattacaaggttcacttcctttatttgttaggttttattttggtgatgattagtttgaatataaagaaatgaaaacaaaatggtttatgtatttttttgtgtggttgttcggttgtcttaatatgatttcactttgacttaaaatattttacattgaacttgacactatagatttattatgacaaaaaaaatcatgtttcactataatcttaattaataaaagatatttgaacccaattttagttaattatatatttaacttcttatacgagaataatatccacctgaatagtcaaatattcaaatagatgggaaaaaagaaagcgatagaatgagactttggtccaactctttctatgtttagagataacttatctatcactacactgccattctttaatcaaactaatagtttatcatcaaagtattgatatttgcataatcacatgcgaaaattagtgtagattatgtttagagctcctatatctaagcagttattaaggatataaatgttcaaatatttacgtttcttcatattataaattagaatatgttaattcagacgttagctaaaaaattagaatatctgaaaatgttaaattggtattgatgttgtggagtgtagctttatgagctactttaccatttgcttttaccgtaatggcatcgatgcctcgagatacaaccatttggtgcagcaattcttgggaccattatgataagaaccaaacaaatgaatatatatttttctttctatgaaatttcactgaagttacaattaattaaatatctttatcaatacttaaatggcaataattcttatctttagggttcctcatccaactgacaataatgactgttcaaattaaataattttatttaaatgtgtatagacaagtgaagatattatcggcaactatttttttgataacgagaatttgataatcaggggatggttaaataaaagcgtaatcttgcttttcttctaacatttttctcaccaaaatttaacacgcatacatataaagtgtgtgaattgtttagtaagaaactctcacgataagttcatgtgaaatcagaaagcagacctaactctgtcttaactctcacaaatgtagcttgtttttcaaaggttaaaagccttaaacgtgtggttaaacatgtattaacaaccaatttgaatgatgaacctaattaagccacgtccatcttttattaggtcaatatttattacctcttaatttcagttatccttaacttttgtttcaagaacaatcatcagaaagcaaaacaaatttgagtttttctctcattcgaagaatattataagtcagagttttgactgataattagcatgtctcttactacgtgatgtattttattatatacagaaaagtcgtggaaacatatggtcagacagattttacctcgacaataattttttttataacgtgacgtaatgtcaaactagtagaaaaagttacgatatgtgtttgtgtgttataaaacgatgtttcttttattggattatgaatactcttatgaatcgtgttgttaaattatgcaattaaacttttaataatccgggaaaaaagtagaaaagtatttatctatcaaatgattaagttgttgttagataacgaaacccgcgcgaaggaaaacttgctaaaaacatatgttttcacgctgcataaatgtgatattgtttaaacaaaaattacgaatgtgtcatgtatgtaaaaatttgagctgttacttatatatttcaattgctaactaaacattgttttatttgtttacttatgcatgacatccgacagtacttaactcgctcatctttttggtttaaaaattgttgtttacattttacacatccaaaacttcattctgttcaaaatattcttacatttatgtttatttccgtttaacctttgtacataggaaatgagactcgcggttacttcttccgtttatttaagggaggagaaaagtgggaggcccatttggggatccaccaaactcgtcgactagttctctcaagttgggagggtcccttcctcattaaatgaatttgccattttctcatttatcactcgttctcttcatttctaattattttctccatattattttgaatatatctatcaattgtcttatttgttgtgattagtaacctgtatattaatatatggtttggtccatctctgattttgataggtactgaatttgatgtcgagacgtcgacaattttgaaataatttgaaatataattcaatctttagttttgttttgataagactcatataaatttttaatatggtagagcatggccaatactactagaattatatatagccggagagtgttaaatatatttatgaatctagcccatagatattaatgaaactaatcatcttgtctttataaaaaacaaactaatcaacatctgctgaagctagatttattagaaataaaatatattagatacttttcggtattactatagcaatataatctatgaaaatgttagatctctctacctttagagagatatgaatcacttcttcctctcaaaaattgggtataaagagagtagaaacttttgcatcaacacaagattaaacccgaggataagaatttgcaccataccatataaccgatcccttttcgtctctcagtaacccacatgattttggagagagtgaatagtatgtaatagtcgtagttttatcaagatgataaaatgtatatgtgatcgattcctttgttgagtttagacttagctactgtattattgacatcgtgagagagagtaagcgcatagaagtaattcggtggtttttgtcatgcatgtaggtgtaaaatgtttgcgaatgattcatgggaaatcaaagtgtacattatgctactgtcgtattctcgcatagctggtacaaacaaacgtcaataattcagatttcacatcaaagaaacgtaaggacatatgcatgcacacggttgggaataatttatgaccatgtaagtattataatatcagacactcgtcactcaaaaagcctcaacaaccaaatcttttgagtgtcttgtcatcttgtagggtccatccgtaccatcttatttatatatatctcaaagtacattgcatgtaaaagtggatcggaataatacaaccgaaaaacaaacaaaagggttttggaaaataggaacaaatgggcaagaaattggaaagaaaaaacacgagaaaaagtaagatagcgtgagaaaaaaggaatatgaaattattaaatttgctaaagtaaagtagacaggaaagaaaaagcagcaacgcgtccctttgattgataagtgttgaaagttgtgtatgatgttttttggtttaaaaagttgtggatgatgtttcgatgaagtttctaggttttataccttaactaatttaatgcacatgcatggatgatggacttgtaaacttcattaggaaggttctttgaactctttaacaattagatttgagattaatacaaaacgttttgacaaataaggtgactagctctattggtttcttttagaggtaaatatccaactattgtttcttgtcattgataaatcgaggtaattattatacatttggaattgaatacaaatatcgtccaaagattttatgttgtacctagccatatcagtttatgttctaaccaaatcaagctttttaaaataaaagaaaaaaagacagatgaaagatgggtttgactgttggttaagcctccatctgatcgcaacgtttttttttttcttcttttttgatcgcaacgtttattagggattcattttcacttgatgaattaatatcacttttcatgtatcaagtgattttgtgagtgttatatgatatatcaaccagatatttgatatatgatatttaatttcctaatgttaaagggatatatgtcctacaagtgacaaatcagcatcatgaattaatgggttcttaatttcgggatccagtttttgtgaaagtccatgaaaaccaggtaggtccggtcaactatgtgacacatgacccaacctgaatcgtaatttgtccatttgtaatacaacgaataatgaaagaccaccagagagagagagacttgattaaaaataacatacagagggatctcatctgcatagtcttatccaaatttatagactgaagaacataaaaattgaactgcaaaaatggtcgcttagttaattccaactttacccattttatagccaattagctacggatatctagaattatgagtaaccacttttcagtgattcaataacacgactggcattaaaaagagaacacgcgaatcatccatgcatacaaatttttgtgaactcaaaataaaatcttctcttgagtccacactttttccaaaaaaaaatcataagagagctcaaaatacactctttttttcttccagataatgaaacccaaacaagcacgaaaatcaatctcgcaatatgcaaaatgtcacctgtgacacttttgtgacactaaacatatagactctcaacacgactcaaaacatgtattcaatttgaaaataaaagccaagtcttccttcgatggatttaaaacacatcaggctattgattacctggccgtatgtgtgtgtaagcatgcatcttaagctgagggaacagactcctctgttttcttttcttcaacagcttcactctttttgttttcctctgccttctccactggtttcttctcactttccttctcttccactgttaacttctcaagaagaccagcggtatcagaggcatctttgctctcttctttctcttcttcagattcagctacttccttgaacttttgcataaatgctttgcaatctgatcatgtaaacaagacttgattattatgcaactctactatgactttgaacatcttatcaacagaagggtgtcataaacacacacaaaacgctttccaatactacacacagctcagatccaagctacattgaggcaaccattattacacttaactgtttttgtctatgcagatcatatacatgaagctatatagttaacttctctagcttgattgccacctttgataggtttttatcatcaagtaactaccatgatactcttcaactttcagattagcgaagaggtgcatatgaaatctaccagagaaactaaaccaaatctctaaattggccaaagacactacatcgaaaacttccaaaacatgctgttaaacagcaatatcactaagttcaagatcctccaatgatctaagccataaattaacagtgtctacgctcgagactgctgattaagaagcacaattatgccaaaacagtatgcagaaagaggtaatgataacgtcgaagctactataacataggcacaatgaccgtaatcacacaaaaacgagacagagcagtgctactataagcaacaattacgtagtaagatccaatcaactgagaaataaaaaaacacaaaagcaaaattcacactcactctcaactgaagcaaaccggatacagaagagctcatccttcaattcaccatcggagaaatcacgagcgtgccatacacaagacttatcattcccagcgtgttcctgaacactcatacccgatccaactgcataaaattccaaaggaaacgatcaaaatgagtaaaaagagactactagaaatacagatccagtatcattttacataaaggtagacaaatcttaccaagatgattagcacagatcttcaaagttttcgattgcctcataacgagacgaatcttcccagaaactctatgtttcaaaaacttaacagtaccagcacctctctccttccactgacttccatctttatcaaatcgatacaacttcgatttcctacagattttcgcacaacaacaatcaagctccgaatcgaaactaaaatcctagaacttgaggaactactacggaaaacgatcagatccagtgcaattagattaaacgaagggagatacatacagatcgaggatggtgtcttcgtcttcttcaccggtggtgacggcgacttcttcaagcctgacgataggagcaacctgagcaccggtgtcttcatcttcgttggctccagtctcttcttcgtctctgttctcacgctcgggctcgttgctaatgctcgccatagtgtcaaatcaagcttttgctctgagttggtttcagttgttgaatttgtgtagtgtgtaagagagattgatggagagaattttgggagtgatttgtagaaaagcaaatgagatttttatacgagacgccgaaagagagacggtctatagagaagaactaaatgggtctaagacaaggcctataggccacatataccctataaacttataatgggcccttttgggcctatttatatatctgcttctttttttgtagaaccaattggttcaaaatacagacaacacgtatctaattttatggaagaaggtcaaaactcaaaattccttcaaattaaactctttaccatatagaaaaaagaaaatcaaatgaagagacaaactatatatcatgaagatcttggtttttagaattttaaaatggtgtctatgaaaagaataagaaaaaaaataatccaaaagtctttaagaaaaccaattcaacattccctgaaaaagaccaccaaaccggactaagaaaagagtaaagaaaaaatgtttgattcagttccttaaaggaagagcagagagatagcaaagcatcaaaaacctaaggctcaacagcagtaacttgttcccactctccatcaacagcctctttccacacagtcacgttgttgttcccatcggatacggccaataagttaccggtcaacgaccacgagacccgccacacaggagtcataaagtccttgagaaccttaccttcccattgctcaccttcttttcccactgtccatatgataactttcccatcttgggaaccactggctatggtggacttggggagacccaagtttggtgcccaagccacatcacggacccaatcagtgtgcttttgaagagctggaaagcaatccatcttccatgacccgttagcgagcttccacactttcacggtattatcacatccaccagaagctagcttgtaaaccggatcgagaagaccagagctcacaagagcaccaggcgctgtggctggggcccatgagactgaagtgactccaaccggatgtgcttggtcaatccttgatgtgtcccagccaccgtcagcacgggctgtgaaaaccgaaatgttgccatcagatgacccgcaggccaaggatagtccgatatcatgaggagcccatgcaatggagttgactgaagatttgtggtctgtgaaaacatgatcttgggtccattggttctggttgccttctttccagagtatgacttgaccatcataggagcatgaagcaaggattgatccatactttgggtgtgcccacgcgacttcccagacaggaccacggtggccggttaatgtggctagttgctgcgatccaccgttgttgctgacaccggttatcttgatggtgcagtcagatgatgcagttgcaattcgctttccatagtaatccatctgcacatcatggacaatgtcctcatgacccgtttcaatcttctgacctggcatgtttccgaaatgattgtccctgcaaatagaagtaaaattgcaaaattgttgaatgagatcatctgtgtggaacaacacacacagcaaaatagcctgtaaaacacagctcatggaagaaaagcagagatcataaactacaaggttcacaaatatctcacagctaatagttgaaacaatgtaaaggctcatatgctatctgtcacaacaacttcgatactcatacatcacatgtaagtacaagatacaacacagcagaagcaagatcaattataacactttcaaaacaatcgcatctgccacagaaaaactcaactaagtgattctccgccagttccaacaggaaactatataaacaataagacataagctacggtatgcaagttgaaaaggaacacaggaaacgaatttgatgatcaatagtgggtaattcacatctcttccaatggatttcaatcttagggaagtataataacatctttcttattttcacttcgcttgctcaagcaatgagcaacatatctcaccagacacatgtatcaacaaagatttagtcgaaatagatcaccatgaaacagtcaattctcagagatcaatataaacctcaagcaacaatcaccagtagtatagatttcaagatcgaaattcgaatcgatgcagatcctaaaggcataaattatctaatcaaaccgattcaaacacaaaaatcgaagctacggttacgaatccgaagcgaaatgtacataaagtagacaattgtataacgcgattcaaaaatcgagaggaaactatggaaacgcgattcaattatacggttcaagaggtcggaatcacaacacaaaacagatcaaacgaaggaagctatcgatcaattactctgcgagaaccctagcttacatttgtcgataaagctaacaaaaagagaaaggaggaagatcgaactgcgcataaaatatcagggaagagataacaaacctgaaagaacgaaggatcgagtgagagacgatgcaatgtgagccgaagaagaagaatatcgccggagaaggaaacgctaagggggatcggaagttttttgtatttgctggttaaaataaaattagatctgggtcaaagttatataaaccggagttcgtatactaaaccgggtgggtcaaattgaaaaccggagggagatgagtgatctataagttctgaacttcagatccatcaatgggccatggctactgcaagtgatctataagttcagatccatcatgggccataaatactgcaatatgcgctttatgggcctactattctttttctcaaccagtatgtgtttttatttagaaaatggattaggtactaatcaaccaatactcacactgtttaaactttaatgcacttatggaaaaagttatacaattccgtttttgcatttttctaccaaatcttaaaactcaaagaaaaccatttgcaggaggctccttgtaataattctcttacatcaattataagtaatacaaatattcaaaacaagtgatataaaatgatttttttgtagtattggttctctataatctttattagttagatgatctccttcaactacgtaaactaaaagtacgtagatgatctctaaatttacatgtttttttcaatatatggataagatgcctatagaaaaaaatcataaaataggaaaaaagttgctcgaccgcaatagctatatatctaggcattcgctaagttagccaaatattaaataaaatctgtaaaaagtattgaactttcttaaaatcataaagtacgtaattaagtgacgacaataaagatgagtgttacataaatcgtaagaatatacatatagaatagtacaattatatatccgttataaaaagtattgctaataaaaataaggttttgaagaagagataagcgatgaagagatggaatgttcttctttataatctaagcgtatattgtatttagattgatacttttttccaaattgaaaaacttatggagttctagtaagccaactcaacgttgcccaccacttcatcgtcatcttccattttctcttccttactaccatatttattgtctgaccttttaaaacattgaacaaagttttatagttcacatcgactatttgacctaacaatattatccaacgccgacaaaaaaaaataagaagaggctgacaacttcacgttgacactaaccatatactttatcagcctaactatacttaattacatggtcttagttcctctctaacgaacttaaatattttactctataatgtatggtccaataagaagctatcaaaccaaaaactgggtgtgttaaatgagagttatcaacaaaaaaggaggtaacaattgagagttaaggacactcacgtaaaagagtttttatgttaatagatagaccgatccgaatcacatgcaataccaaacaaaaagttaaggctgagaatgaaagatgtagatttcgaaaaattattcttcttattattgttttgataatgataataacaacaacaactacaacaatatagaatatgcataataatactactggtgtaaaacgtggcatatatttgaatattctctaccaccaatatcatcaccaacaatattgcttcacacgtcactgccgacgccaactccgtcgccgactcttcattcctcggttgtcttacggaatcatcgcttgacgactccaatgatatgtaagattccaattctacccttggagaaacaagaacttccttttttgcctctgactcttcggaagtgtctctaacctcagtccaaccattagattcccaatttgctcctccggttatagctaatttacttatccttgccatcgccgaaaccatggattctggtctccattcgtcgctctcttcttcttcgtcaaactccgagttgacccagtcaagaacacaacgcggagacgactcagtgaagaacgagtcatgatgatcttgacacagaaacggatgctgcaagagctgatcacagctccaacgctgactccgatcacgtttcaagcatttctctaagaaatctctcccgagttccgataaccccaccggaataaaaggcaaatcgttagagaacccgatccgactcagcgagtcgaaaccgtgatcttcccaagctggttttccggtgagcatctcgatgacggtacaccctaaagaccacacgtcactctccggtccttggtactctcttctaaccacctccggagccatccaaagcggacttccacgtggcgaaacatgaatcgtagatttctcaaactcaaccgccgatccaaaatccgctagcttaacggagctaccaccgttaaaaacaagaacgttcttagatttaacgtcgcagtgaacaattccgttagaatgaacgtgactcaaagcagagacaagacaccacacgtaacgcctgagaagcgtttcgttaacgattccaccgttagcaacgtcaccttccggtgaatactctaaatgaagatttcgaaacgacgccgttccttctttagacacatcatcaccgagaaacctcactatgtttggatgagacttcatcgaccgtagaataacgatttcgttctctaacgactctgcttgagaaggaagacacgtggcgagatctatcgacttcacggcgaaaagtccaccgtcgattttactcaaagctt

SEQ ID NO: 309 - DNA, 79272 bp, Arabidopsis thaliana
aagcttcagcccgtcctcgaagcttgagaataaaaacagtaacagagaaaagaacaaaagtaagttaggtgatgatgcacataggtaaaagggaacaaagtgacatactttcttacaatgatatttgaaaatccgagatttgatacctctatcattcagttaaggatattgattcagatgttaactaacctgaaggctccagcaaaagccagagcagtatactctcccaaactgagaccgcaagtcacatcaaccgagttaattatttgttctccgccttcacgaacacggagcaattcaactgctgctaaacttgtgacataaatagcaggctgagaaaatgatagaccaataacttagacatcataccaaaatgtacatactaaaaggaaacatcacataaaaattaagttttgctagagttaggtgacaacagacaagaaagaagatcataaatctgaagttgtccctaaccaaaagttgcaaagatacctggcttatgaccgtagaatcaagcttctcttttggtccattaacacaaatatccaaaagatcatacctgcagaaagccaccatatagtttattcattcacaaaaacaaacaaaaaggtttcaactttaaacaaaggaacataccctaagatatcattagctttcttatacaactctccagctgctccaacactctgagactcttttcccattcctactgcttgagctccctgagacatagcaaattcatctaaactttgtcacatttgatctaaaaattgaaacgagttctgagagattacaagcaaagaatatgacgttatgatgaagaccctacattgtaattaaaatcacatcaatcagatcaaaattagcaaacttttcaatctgggcaattccaaatttcctaaattgatacgaaatcaatcagagtccacattttcattgttcagattgataacatgtaatcggaagttacctgaccgggaaagagaaaagcagaggtgggtttgtaatcagcgaacagagaatcgtgaacagtagtactctgagatccagcagagacgctcatagaaatcctagatcggctgagattcttggcggcgaagccaaaggaggcatttttagaggaggagagattgttgagagatatggaagggaggagcaaggaagaggaggcggtggtggccatggcggagagagaagtgcgccggataagagaatgagacggagatgtgagtaagatagtacggtgaagcagtgaacgcattcagagaagtaaacagtagtaatcctttttaaaaaagctttagcggagttaacgaagatgatggtagctgggggaagtttttgaagaaaggagagaaacggacacgtgtccaaatttgattggatgtaaagcttaacaaaagaaacaaaaaaattcgtgtgttcaagactacgttaaattccattttgtggtcaatcatccaaagattaatgttgtatttgtgttattttggtaaagagatgcgataaaatgatgaggaaatagaagaaatacgaaaaaatcagaacaaaaaaaaactcaggtttgacgacggcgattaggttttgtaggaaaagcagttgactttgtacgtgaaattacagatgtacccctcgttttaactaaaatgcataatattgtccacttgtaggtatcgaacttatcactttggctaccaaaaacaaccttccagaccacaatgctacatcaaattttaaaaatatgactgattaaaagttatatatactatatatttatataaactatagcatatttgccaatttgatttaacgcctagtcgacgattaatccgaaataggcggtactctagcacctaagtacgtactgcatgacttttataacattgcagatggtgatgactatcaccggaagataaactcaatcggagaatagaaaatatgatttggagagtaatcgttgacggattctccaaattaggtatgaatcaagtcattttctcttgtatatcgtgactaaatgttgtaacaatcaacagaacaactgatctttattccgttttttttcatatctattttataatatttcaaattaatgtatgtttaatattttatactttgtaataattattaaattgtatgaaataaaataattttatattaatattgtttttccagagaattcttctaaaagaacctaccattggactataaaaaaccaaaaaaaagaaaaaagctcttttgttaatttttttgaaatttaatcataaaaaaatagagagaacccttcgacagattctctccattggaggtgcttttagatataaaaaaaaaaatgttggattatggaaattatgtataattgtgtattttatttcattgcggagaagattgaagtttaaactaaggtctagggttgtgcaagaaagaatacacaattgtgtacacgtttcgtgtgaggtaaaagatatcgtaaatcaattatttgcgacgttgattgcaaaatcgagaccaataaagagtatcccaaaaatgtttaccataccaaatcctatttctaaccattttagtgtaaatattttcgcatgaattcaacttgggatcagtaaatcttagtgtcgattggaatggataccactcatgtaagtctatcaaccttttgttccaatagattatgaattttttttgtgatgtttggatcacttatgtcatgacgtttgaattattaagtatccagaggacaattttgtttattaggattccacaacgaagaatgtattttttgtacttttacatttagggttatccaatttataacaatcgatcaaaactatctcattagattctattatagttcaaaatggtacaactacattccatcaggatgaccaacagaccaccaaacttacaatcttatggcagttgtagtcaatttacttatgtcgagttataggcattgacggcgaattgttttgagaattttggagaaagttgaccaaaaaaaatcatctttttgtggaagaagttatacagaaatgtaattcatggatcactatttttttttttcagtttaatggtaaattttgatcaacggaatcgcaaccacactatttacgttctttttcaagaattattttctcgtaaagatggccaattaaagatcgatatgatgctatttttgcaagaaaagtttatgtatgataatgtaattaaaagtatcttgtgggttcatattaagttaataactaataaagttgtttgggaaagtcagctagaaaaagaagattaactaacacagcttttatttggtaaatttttaatcggaaaaatgaaaacactcactctattacgaggaaaataacaaaagtacatcgaaaacaaaggttgaaccactttcaatagagcagttgtccatctttaacatatcaagactcacgaagtctttttttgattaaaaaacaagaacaaaaaaccaaaccccataaattctttagatccaacggtagaagttttttattagcatcttggaagatccaatggtggagcctgcaccgattgcaactgtccacgaccgttctctaccaagaaaaccatagccaaaccccatcccaaatgtgaatcaatgtgacaatgcataaaccatgctcctgcattacaccacaagtatatcaaaatatgtttttcatttttgagtcaataagatcatttaacctatggttacaaagtatcaaatgctttcgagtcaataagatcatctaacctggattatcagcgacgaaccgaattgccacccaaccacctggaggtgttccaatggtgttcctctctggtgggtcaaataagttaaacctagccgggtctgttctcgggttgaaattaccgaaacctgacccgaccacgtagaattggtacccgtgtagatgcatgggatgattctctggcgtgacaatgctagtgtcttgtaacacaatctgaacattagatttgtacttaagcttgtaagctttggttccttttatgggctgccataacccgcggctaacgttacctgtgtaatcgaattgcaccggtggaacgggcggaaaatccgttgtgaagattcctggggtgccttggtaatatgcttgcatgacggagttacttcgtggtagcacgaaggacatgttgttcatgcttgctgcgaatcgggtcccgttaggaccttggcaacggggactgtttgggttggcacagttgattagccctaatccgacggtgaaaaagaggttctcgtcgacttgttgtggtactggagctcgtttccagtatcggagacggttggtgaaagcagttgcggttgcggtgtcgttgaacccggggaggactgggaaaacaggagcgatttgaccacgaccacggccacgtcttgttggagcgttgacgtattgtaagatagcagtagtggttgtgttgtcgaacggggcgtttgcgctgttgtaggctcgagctgccatgtagtagcggcctggtctctggtttgccgtgaggaggacgttagtggtttggccaggaccgatcatgatgacatttgtggtgaatggtttcgtgtaggcggaatcagtttctacaactgtgaactggtggttggcgactgagaagaagagctcttggttcataccagcgttgatgacacggagttgcaccgtctccccggggaaaattggaaaacggattgtcccagcccgcgagcagcggtaaagatcgcctggttgaccgttgattgtgtaagcgtcagagacattagctgctgctcccgtaaattgtgcttgcttcaaaacatccattgggtttctatcccaccattcccctattttagtaagtattattagttgtgatcatgaaaatataatttgaagtgattagaagttacaaaatgtttagttgtttaccaagaagaattggaatgtcacgtttgggcatagagaagggataaggagaaccaagacgagggtaaatgatgagagcaccatagaccgtggctctgagccagcggctatgagcgtgccaccaaagcgtaccctcttgatcctcgattttgaatctgtaagtgtaggtttgtcctggacggatcggacattgtgttatatactctggaccatcggcccacggattccgcagctgtctgattccatgcctatcccaaaaaacagagcaaaaaacaaagtatgaaaacagagaacataacataacatatgtttgttgaatttgatggtcaaatattttaccaatgaatactaatgttgtaacgggctctgttgatgacagtgattgcgagagagtcaccgttcctgaccacaagcgttggaccagggtactgaccattcacagtgatgctttggtgagttctgcacagcctcttcactggtgtcggtgtgatctaaagtcatcgtcgtttaaacttaaattaagggaattctataaacgtaagaacataccaaaaagctttaatgtaacattagtagctagcttaccacgaattgatggacgtgatgttcagcagaagcgaggaaagcgaagtaggcaagtagggcaatgaaggatagcaaggagaatcgccgaaaagactccattgtttgcttcactgtgagaagctctctgtgttggagatttgtgagatgagtttggagaaaaggaaggagtggtatttatacacactaagcgggaaacaacagaggtcttcgtgaattcgttagcaattaaacaatttattatattttaccaaagtggaaactaatattaggtttagagtcagcaggagggagaaaaaaaagaaaatctcacaatgggttaagttgattcggtacacccactagactaattcgaaactaggatcctttattatttgattattaaaaatcatgcaaatcaaaaatttcttgttttactttgtttgttttaattgggaagaattagctaaaaatgatatttattaactaagatttaaattgatgtttttctttaagttggagcacttagaagatcttcacattcttcttctctaatgaaattaatgtttacgttcaaacatatgtatcttcttcggtttcccttagcatacaacgatacacgtttttaatttgcataagttttttttttgtttttccttaaaattaatttgcataagttcatttttattattcttggcattatggcgtatacatttaatttacgtacttctatattatatcctaaaatagataatattctcttcttttcttcaaattaatttagtcctaaactaaaatacaataaagttttcgggttatctttattgttcttttctgcatatcctcttatacgtaaactagaaaacctagctaatgagtcgcgcagcataatagcggttgcaatacaaaaccagccaatgaaaataaaaaatgaaagaagtggttcgatgggagttgaaaattgtggtatggatttggtattgaactctataactaagtaactaacctttacttttaaataaattgttagttgaccttttgagtcacactacatacgtccatgggccatggtctcactcacaccctcacttctatatcccaatttcgtttatatagataaatatacattagatgtttatcgacgcctaaatttgacacctctgctacataaactttgtaagtaaaacgatactaaacttgtaaaggtgcacgcggagctattttcaacgttgaaacaaagttggggattaaggatgatcaagctattaagtactaactaatatgacttatttacattcaaaaaaatattaataatgttataatcatattcaatatttaagtaaatgtgtgttttaattgggaggaagcaggtttatcttcaacttgaaaaatcagtagcttacttaactcacacccaaacaagtacatctcgtattaaattaggttgcctgaaaattgacatttttttttttgaatattttaagggccataaatttgtttagttgctaattaagtaaaatacattgtttagttaattaattcgtaaatcgtgaagtttgacttaagtcttaagccactcttgaatctgagcatctatgaagttccctaggtatttgtaagctgcctcggagggatgaatggagtcccaaaacaagtgatccgaatgattcggacaagtctttgacaaggaagtgcacaagaagcttgtttccaagtatcctgttccgcaacatcctttcttcgtctccttgaatcctgtttttatttgtacgacgatgagtatatattgcataagttagtaaggttcagatttagatgacttgtggaacaagggaaaaaattgtatataccgtatttgctagggtttcggatcatgtccatcacagggtcgtagacgttagcgtaaaggaacttgcttccgggtagagacgcttggatctcaggcaatttctttacaagcttctgattgtacaaaatggagtctttgttttcttgttccacacaaattcccaaaatggttctcaatttcgcggtcaattggatcggtaaacatcccattggcggcaaccctccgactagaatattccggcaacctaaactataaagctcctgcacacaagaagaaaagattcgagagtcagcacgacaaatatagctccatgaaataatctggtcccagaccatgaaaacaaaaatttcaagattttacccggacaaaaccgtcaagcctcttgagaacaaaatcttggtagccatagatagtaggatactcgagacgccttatggggatatcgtaaaagttcaagatgaaatcattaggccctgcgcttatgaccactaaagcgttgttaataatctccatcgctttcttgtctcctacgatacctttgagacgagcaatataattcttgaacatgcttggctgttgtgagaccggaatagctttgctagatagtgaggtctcgtcatcgtagccagcacccgcggatgcaaaacagactccagtgacaatgtcttggtcggagatgttcggttgtagaaacggaggaacaaactctttgatgttgagttttgtggagattacgtcagagattagctttccgtttgagaatcttccgttagcttcgtggccgggaagatcaacgccataagggaggtgattagccttgaagacggcttgtgagtagtagttgttattgcctgtgtctgccgttgagtcgccgaatattagaatcgccgggaaaagcggctgcgtggtgtttgcatccgcattgcaagacacgaggagtgttgcaacaaagagaccaaacactatggttttagatatatacattgtgtatttgatcacttcctgttattttgattcctctatagtggtgaattaagttagtgatggcgttttaaagagcttgaaggtgatgttcatgttctgttggagtaaacatagaagctttgaatatagtctacgtaaagatattaacgagatttcacagatacattaccatataaaagaagatttttttctttttttttttagtccactttaacgtatttaacactttatttcaattcctttaacaagaaatatcttattaattaggtgtttgacttctccatattggttgacttcaattttactttattttaatttaagacatatttaaatttataaatttataatttattcattaattttggttttggatggcttttaaagtttaaagatgcacaaaatatactaacaacacaacgtcaacaaatcatgaatgaaattttcaagaaacgtaatatgttggcttttattaaaaaattatgatcgtcaatatatatattttttttcgtcaaaacatcatttctattaagtaatcggaaggatactcttttatagagagaaccaatcagaaaccgacttgcttacatggagatggagagaaaaactattacgagtttatgcctacgatcgtcgatatataacgcaagaaatttgggttgtattatttcatttcgaagctacattataattttgtggaattatgtttcaaaattttatgggctggttcaacatataaaggcccggccctaacaacaattatctgtacatgtttcctcgtgtaaaaagaaaattgaaattaagtaattaacgtaagaacaatatgaaacggtaagagccataatgaatttatgtaaatgatacagcttccctatgcatattcctatcatatttgttataaaagtatttaattatggtttgatgaaaaaaaaagtatttaatcatggatgataatcatatcaactttttttttaatgcagttgttgatgtggttacagtttggttatattttatggcttctactatctcaggaggaaaaattgatccctacataaaatgaaatctgaaatggttaacataaaaactatacgaatttacggtctcattcaattttctgacagtttctttctcagacgaacctagtagttcaacttcaagaccacccctttttttatatatgattgatgttaatgttatatgtcctacatcttcataaaatctcttgaaatgtcatttggattttcctctcacgtcaacttagctagttttaagatagagagagcaacgtgcaccactaaatcatatagaacaaaaaaggatcttgctcacgaggataaatctaaatcaacgcgtattatcgactggaatatctccaatgatctaagctatatgttattctcttaatttgtcgtttatacttacaccatcaggttcttcccccctaaacattatcctgtcaaatatttttgtttgtgactacgaaattctagaaggttatatattaatctttcgagagtctacaatagtaacaacacgtttgaaacttaaaataaactctgctgttcattttcttaggcaaatatttacaagaattagttttactctccatacgtacataacttcagatggttcacaaatacagctcaaaatctttcagaacaaaaatgtaaaactgaactttgtaactggaactagaaactagactttgattcattgaaccgtttgaccaaaaatgacagctatgtatcttttctttatttccgattccagcgttgtgacaaaaaaaatagggagagacaagcaaccatattaaacttatagttttgcgattcttgttagtatttaatataataaggaccatcatagtttcaccagcatatatcctatataagtaaactcaaacttttgcgatatactactatatatctaagatagaaatatttttaaatgaagatgagcgagtaaattttttatggtttaaagaaaaaatattccatttgaattttgcagttgaactccttttctttttctttttggtaggaaatgaactctttttctaatgagtacagaaatacaaaattagtatcctttagagtatcattatattgtcagccgtatttgatatagtaaaatatttatttccaatcgactgattcctacgttaaaatatattattcagattctaatatagaaaattgtttgcttgcataaactggttcataaataatttagaaacaaacaaacaatcagttctgtcctaaacgattaatttaaccctttttcactaacctcattcaactacataattaattatgtggtttatgatccaccgtggatacaagtgttgtccaattgagggaaaagacagacttggctcacgttcttcaattaattgatcgtcttttagtttcatggttaattaattttcaatcataagttcataactgaacaccaaaaagaaatatcttgtggtgcacacgaggcttattctttgatattagaaaataattaaaatcattagtttcataatcaatcaatttcagcgccgttcgtacgtaaaatagtcggtgcctgaaagctccgtgctacgaagcttcctcatacgtacttaagtatgtatttattcaataatcatttgatgaatatggggtttaccaaaaccttaagcaccattaaattcatgtcattaaggggaagttaacgtctcgagagtcgagaatcataattaactgattaatataatcctgaaaaatggagaatcatgatctaactagattcctacgtacatttggtacatgcatattactttttctgtctcattttaacagtgtttatataaaattaacgttgaatattacgtagtactattggtgcagtttcagtcttaagcttttgtcttttcgagatgagacatgtgacaagaggctttcaaaaattggacaaaccattatttttcttttattattcaattgattggactattatgatcgatgtttatgtaaaacatagatttttatattatataattaaacgattgttgtaaaactgtcttctaatgaatgttattgtaagttgtattccatcgaaatttgattcgttccagtttgaatatttttagtttattcatttaaaatagtaataatcaaagtaaggttttgtttatttatttagtagtaaaaacccctaatttatctccataataatagtgctttttaaaaatcggatcttattcaaatactctatgtacaagaacattatacccggattggtcgggaaaaagataacaataaaattaaatcagttaactatttgattttagatagttatacttataatttctttcttgttacgttatttaattatacattgatctcctttgggtatcataacccgagcgtaacggatcctctggctaaatttctccactttttaaatatcaataagctcctcttactattttctatagtaattaataccatgttgcatactagcataagtgttagatgaaattaagtacaaatagggtaccgggtacgtacgggttaattttttgatttaaaacgagaaaaatatatatgtggcaattagcagtaaagtaccataattaagaaatattacaatcaaggaccacaaattcagttaatgcttccttccatagctagtagttgcctgagagcatttagactattcgagatacgaaaaggaatacgaaggtgtatcgttttactcttttagatattacatcgacagattataattgttattctcattattgtttgtcgttttgggaagcattttttatctggtgttatttttgtcttttcgcagaattgcattacagtataactgtagaagaataagatgaaaaacagttgtagcaaattagcaaatgtagtatttgtgtatgcagtagttttcacgtattaaaactaaaactgtttgaaaatacaataaaaatattatacggtccttaattattcgtaacgaatttctttactggataaagcatctatataattgtttaacaaaaaataaaacaaagcacatatgttaaaaataatagttggatatattatttagtagtttggtgtaaatcgtacaattataaagtgcaactttctttctgattagttttgagtcttttgacaatatattcatatattaatttcttctatcaaataattaatcttatagttattaaaaattaaattattagacaggtagattttaagaccaaaaatgattaagtattgaccaaacattgggtatattttattgttaaaacgtagatttaattgagtggaataaaagaactaaatggttttgtaatttgtacaatgatgagcaattgagcactataataaggattaaggagggctgcttaagttaatcacaaatccacaataagaagaaagggcattttagtaaataaaatatccgtaaacgtttggtcaagctctctttaatcatttttggttcactctatctatatatataacctcgtcttccccacaaaaacaacacataacaacaacaaagaaccaaataaaagaaaaaaattctataagtaatctttattttgctaaagaaaacatagaaatctgtttgcaaagaagaagatatgggaaacagtttacggtgttgtttggcttgtgtacttccatgtggagctttagatttgatccgtatcgtacatctcaacggccacgtcgacgagatcactagtccaatgaccgccggcgagattcttcaggcgaatcctaaccatgtcttaagcaaaccttgttctcaaggagttgtgcgtaagatcttgatcttgtctcctgaatctgagcttaagcgtggaagcatctattttcttatcccggatacttctatgccggagaagaagaaaacaaagaagagaaaagagctccgatgccggaaaaagcctcttgaaagcggcaacgatattaatagtgatcatgtgagtactaataaggatcttgatggtcattgtttgacgttgtgtgagaaatatttggaagatgttatgttgtcggagaagatgagttcggccggtaaagagaatcgtcaccgtcggaaacatagccggtcggcgtcagtgtccacgtggcggcctcaccttgatagcatcactgaggatcttaattaaattagtacttcttctttttttcacaccttgttaattatgtctctattttcttaaattcttttttttttttttttttttttttttttttttttttggatccggaatcggatttttatttaacatgcccggtgagaaaatttcaaatattttatttattatgaagttaaaaccaaaactatgtactgttctcatgtggataagatctatgttaaattgatgttctaatttcagtccgtggcagtgaggacaagattctaagttaagatcatatgaccattatctagaattaaaactttgtactcatatgtaaactggatcttgtagtacaattagaattccaaaatgcaaaagaaaaattaatgtaactaaaccaaagtatatgaaaatggtaaaatcatatgatgatggtaacaaattactaactcaatatttgtttaagaaacatctgggtcgagatcaagtgaataatagctagaggtcaagtaaataataatggaagaggttggaatttaaggagaattaaattgaaaattttcaattataaatgggttgatgactttcattaaactgtggtcattataaaatcagaagaatttaaatcatactttatataagaagaactgcatgttcaactgtaatgcaacgtatttagaccagattagttttttaagtttcggtggttaattatttattggtaataatgcgaactcgagacggctgattaattaagggtccaaagaaagagtgtagagacgtcaggcaatcatgtaaggtcgtcacatgcagatgtagccatgtaggtggaccaatcgataagtctgtggaactgaaaaacacaaaccatatgttttcaaataatattaaaattttcaatcatataaagtgcaaagaaagttaatggtagtattcactatatatggacaaataccataaaggcctcaatgattatacatgaagaaatcgataacaatgttttttttatttataacaattctgtaaaatttggtaacggcatatatcaatatcaaagtaatggaggctcttcagaatatattctttctagctgaaatttagagtcagcaagattgaaagaatgtgaattatttacgaagaaatctgtttttcttgctaacattattgggagaaaaacttaaaagctatatgatggagacatctacaagttaagaaatggaaaacaatattaataaatctcaacgaagaaagaaaagaaaatgaaagctggcgagagcatatgattcgtctgccttcacatggattcccatcctttatgtcccatctcttctaaacacccatcttatcgttcaccacatctttttttttttattagaccagacatgtaaatgataacttcaagaaaggaagaaaaccaaaatttaaaatttggataagtatctacgttgtaattaaatggatgatttcaaaaggtttcttataaccaaaaaattatacaattgaaacacgatacatttccaatgaaaagcagcaaatcggttaccaagtacgaatttgatttgcacatttttggcttatgtcacatatctgatatctgtgtttggatacaaacgggacttcgtattttgatatacgtccaaaagtccatcgtctttctctttttggcccttgttgtgttttgtttctagttgttatatatgtttatgaagctgggtttttttcttcttctttttcatatgtcttatattctcctcaagccaaggttgttggagatagagaattggtgaaaatatccacatattgaaaaactacaaagatcgaatttcaattgttttaagagttactttttctttgatgtacgtagtgacatttgatacatatgtcctagaagtgattattaagcatctcatttgttcttaggactagagatatagttcataatggagtcagatgcagtcttcaatctatatgaatgataatatatatgtcacatagttctggttctccaacacataaaacccttcaccccaaaaaattgcttactacgttgatctcttattaatatataaatgaaagaaaaaaaactactacactataacaacatgatgacatcctgagactcaactcaagatcctaaatgcatctacctcttagatacatctatgtataaatatctctagttatgaacttatgattaaaaaatgaatgttactaattaaatcaagattaagtcacttggttcctctagcgtttaccgagatcaatggtagtgaaaccttcttcagcagagaaacgttgttgtattccagtatcaccaatcttctgatgctcgacgttaggcaatttataactatcgtccatggccagtaagtcgtctccttgctgctgatgaacgacaagtacggagaaatgaaaatccggcgacgtcaacatatctccgatcacacctaactcagggcactcactccagtccgtgagtccgtacaagaccgaagactctaggtcatggtctcgacccactaacaccatgtcataggcatctccaagtgagctaatcacttgcgtagtctccacgccatctctcactatctcctctacgtagtgaattttccctttgttcgctgcatagctcttgaaatcactgatgagattgtactcagacatgtcgctgtaatcttcgtcttgaagagcgctcttgtgacggaaatgtatcatcgtaacgttaaggtctggtttttcagccatcctcatgcataacgcgagcgcttccgcatcatccttgccaccgatgaagagcatcgcaacgttctgccacgtattggtcatcaacacggaccgacgtccctcggtctctcctcggtctatgaatattgccaccgaacaaggtgccgcgtccaacacgttaaggtttatggtccggatgggcccgttgacttgtccgaccgtcccgtcaatcgcgtactgcttgtggaacggaatcacgattaacgtcgctttcttgtcgagggccagcgtgcatatgtcgttgtttatactcgagtaaggcgcggctgcggtaaagtgttgcgccatgagagctccctaacataagataagtatccattattatcaatctacaaatgcagatgcaaaaattatgcttgaacaattgaaaacgttattgatctcttatatgaggttataggcctagacccatacatcccctcaagccggagaccagagctgttttacctggtacttttgctcaaaacgctgaaaggcgttgacaatatgtgtggactgggccgtgttagggtcaagtttgttcatctgatggtgtggtgtaaggagtgcatgagctcggcctttaagctcgacgaggtgcaacgtaaagaatgagatcgggttaaaccgtgtcgggtaagtagcttctagaagattaaccatggaaggaacgttttcaacattatagagaccaaggagaagacgtagctgaagattatgttgtctcgtgttgaggattgttcgtttgcttttgcttttgtaacgttttgaagggtcgtagaggtacaccacgaggaaccgggaaataccagttacgaacaaaatcgtgatgatcaccagattaaagcattctgtatcaacaacctgtaacccaaattcaaattttcttttaccttaggttaaaagaaaagtttacgtgaataggaagaaaaactctttctatatttctaattgtgaaccaaaacctaactaaaaaaaacaaattaagcaacgtctatttatttttacctgagcgtctttccacacgatagtagtgtagacttcaatgataccttggcaacacatcaagaaggccaaacaaagcgcgtctccaatctgcgtttggcagtaagcagacgcagctgctgttccaaggaacttgcatccataagtgatcaagagaattatctcaatcattaccacatggtgctcatggctctctgttatctcaaagaaattagtttgcaacccactaatggcaatgaaacaagggaggaacaaattcgaagcaaacatctcgagttttgcagcaagttccgtgcctaaaggtggaccatcagggagcgaaacacctaaccaaaacgctccaaacgcagcatggacccccatggcctctccactaaggctagctatagataaaagcaagagtaccggaaagaacgggacaacgtctttcttatccatggatttggttttcctctgggtgagccatactattataggtctaaagacgaaataaatcaccagaaggagacctatgatcatggaaagcgcgtaaagactagtcatcgtccggtcacgtgtgtagagattaaaagcgagagcgacaaaccagctacaaacttcgcagaccattgagcagtgggtggctaaacgacctagctcggagttaaggatgttaagttccgctaagaccgtggttgtaaccgggaatgaagtcatagagctcaaggagattgcgctgcttgtacaactaatcacgtcgctgggaagtcccatagttttactaatgaacataatcgtgaggttcccaagagagaacgggaaggcgtaagaggctgtaccaataagaatggctttagaaccagcttttctgataatactcccatcgattttgagtccgaggaggaagagatggatgacgaaaccgacgtttgaaagcgtttgtattatgatcttgcctcccgcgggaagaaacatgttcatgtaaatcacattatgtcctaagaaagacggtcctaaaacaacaccagtctacacatacacaaacaagaaaatgttttaaaacgtatattttcgcaataagagatagtgaatgcggtatttgaaagttataccaagacttgagcagagatcattccttgctttaaaggttgaaggacgcggaagataagcctagaggtgacgatgatgactgacatttgtagcaatagaagaggcaatgcgtatttgagagggttacttttcatgaaaatgcctcttgaggtcagcatgttttgtgcctggcacacaatctcttccagcatgaatggaccgtgcacttcgccccactgcgacgagttggtatcttctctgccaaacatcgaaagctccatagtcttttccttatcagtaaaacgaagaaagcgagtagaaagagggagagagactaggtttgggaaactatcaatgttatgttttcatttttgatgagaaaatgtaagggagaatgagagaagaaaacagaggactctgtttttacttgtggctatgaaggctaacttcttcttatcagtaaatacacaaaagatagattggttcttcgactttggtgagatcaaagagagagagatagaggtatgtgagagaaggtagaagaaagatgagcctatatttgttgtttctatttattgtttctttctattattatgtttggttgatcatctttcctcataatctcaaccattctaaatttgtggttttggtttcacttctaagttctaataataaataaaatgaactcacacaatgtggagatagaatgctagatgtgttgcaccaatcaagcaaagtgggttacaaaccattattattgctttatcaaatttgaatattaaaaatgtacataaatcaaacaaaagaccaatacacaagaactataaaatggactctcaagtgtttaaagtcacacagatgagaagagaggttattctataaggccaagataataataaaaacactactaagcaccactctgtacaaaacaaagtattgactgtgtaacaaacaaataaacaaactgtgaatgagcacaaaagataagccatagtaagattttttgtttttagaaagcctaaatcatattactagtgactaagtcccaataatttcacgagcgacgtagcgcggttgggatatcgtgattgtgtcttccttcataggtagtgagaactgctctctcgtctgctgcggatctttccacttgcttcttcactccacaaccttggaatgtgcacttgtagtagctcctgttacaacaaagagaggattagaaacttgaaacatgttaacaatttgagaaactaagttttgtataaacaaccttggattagtatttcctttgacaactttttgaccatatttcctccatctaaagccatctataagaacatcaatatcacttattgtctgaaccacaactcttggctctttaactcctttgcttacttctatagacatcccttcatcttcaccttctcttttcctgttacacaaaactcaaaacatgtcatttccaaaacccaagaagaaaccttttgcttccactaattaaaaaaaactacttacatcctcttcatctcaggttgttcctcctcttcatctatctcaccatactctgatttaaaacttttctgctcaagatcactatagtcaaacgaaatcgaagagttctctgattgatcatgaggttcactaacaacagaagcaggattaaacaagcgcctcccattaaccgatgatggtaatgaagattgagatggtctcttggtgaactcaggcttaggatgattatgaccacctttataaatgatctcagtgatctgtccatcagaagccgtctcaacaatcttcttggaaacacaatcaggatacgtacacttgaagtaactcctagggttttcgctcttcttcacttgtttctgaccgtattttctccaaccataaccatcattagagttcctactcaccatgtatgctggtatctttatctgacgttctgttccaaaactttgattgttgttttgtgttgcaatctcattaggaatcatctcctgcttcttctcgtgatcttgaacaccatatgtttcttgcaaagcctggaaaataacaaaaaacgaaactaagtttgattcatcaatacaaagcaagtgaagatgtttcaaaacgctaataaggaaacacatacagaagaagcgtttgatggttgagattgtagctgccagggaaaatctgagtgattgtttgttgttccattaaagccttgcaatggaaacgttcctgttgttggagatatcaaactctgcaagtaaacaagacaaaacacaagccagagatcaaaagattgtctttttttttttcatttctgcaataaatagaagaaaattaagaaaaaatggaagctttattacgtgtgaggagctgagaagcagaggagaatcaaggtaatcggagaaagtgaagttatgagaagattgtgaaatcggaagaggtggtggttgagccgtcttgaacttaggtaaaccagacccggttctctctggatagtacccaccaaaactcgacccagaaactctcaagtcttcatcatcttcgtaacagtcaacgccggaagaaccaagaaggtcggtgaaagaagtggaagacatgatggtctttaataaaggagacaactttaagatttctaaaacagaggattcgctaaaaaaggaaacttttttatgaaattgatcttgaaatgaaaaagaggataaaactaaaaaagaacagaggcttttagattgggttaaagacgacgacggtggcgtattgagcaaggttttttttgtttctctctcttcttgtctttttctactttggcctaaatatcatttttgattttaatatttctataaaatggttgaccagtaagatattcttttttgatgagtcgtctcctaatttgtgataaatcgtcaagtgtgaaaccgcgtttcaagggtctctttcaatgattaaaccaaaaccggattaatccgttaaccaatagaaccgttggttggttatacacaccaggtttggttggtccagtactatcgtcttaaaggacaacaaacaaacaaaaacaagactcttatcatttcttggcgaaagagatgaccattggattctggggagtgattttgaaaccttgaagaggttgcatagctatggaagcttgaacatcatcttcgtactctacaaacgcgattcctggttttgcgtcgatcattcttatctctttgaatccagggtactgttcgaagagaagctgtagcatcatgcttgttgtctcgtgtgggagattctgaatgaagagtatgttgtttggtggcattgtttcttgcccgctcggctggaacgaaggctgcattaagaagagcagagataaaacgcaaaacatcagcatcatctccagataacaatagtttggttcacatgatccaacaatggaagatttttctgaagatgaaggtgagaacaagaacacttaccgcagggactccgttattggcacttggaccattagcacttgggccattagccgtgtttggtcgttgggaatcttcacgctttctttcaactgaaagtaagaaaggaagtttgttaactttagatgcaagtgaaaattttatagttgtatcattgaaccaacatctacgacaaaatgcaaaaagaagaaataaagtttaaaacctttttcttcttgcttcctcttcttatcttttggaacgaaagttccctcagctttagctagacaatctgactttgcttttgcatattgtaagcgctgcacttaaaagatcacataaaaagtatgaataataataaatctcaacctgattggaagtagttgaatagtttacaaacaatcgaaagaggtaagatttagttataaaaacaatgtatatatcaaacagaacaaacattttgacaacagaaatcataagagaatgtgatttgagaaggtcagcaacaaaatccaaacacacatataactaaatgttgattgagaataacacagtcaaaggtaatcattggtaatcacataaacacactaaggatttctgcttttaccgcatcaatcaatctatacaacacacagaatatcacttccagggaaattatacagagattgatatactcaagacagaaaaggtagtggatactaatcattggttactcatcaacagcaacaaaatctaaacacatatatgactaccaatggattgggaatagaaaaaggtcaaaggttccaaaacaaattgttagtaatcaattacacaaacacactaacgatttgcttctatcgatctatacaacacatagaagatcactttcatggaaactataaagagattgatatactcaagagtgatgaaatactgaccattggtttatcatagaagggaaaattttgcatctgacgaacagcatgaccagcagcagtgacttcactaaaagtaacccaagcttgtcctcggagcttcggagtcttcaaagcaaccacatcaagtatcctcccaaactgagagaacaaacagtaaagagatctcttcaattctgagaaaacaaaaaccaagtcagataaagcatgagattgatgatactgccctgagccaacactacttcacacgtctataacaattatccatacaatggcgaaaacagacaacaccaacatatatatcttccttataaccttgtcactagattcaatacgattctgaaaccctagtatttagaaacgaacactctatataagctaaaaacaagcaaaaaccctaacattcagtactgtagaagcttgaatcattggtacaggaagttcatggaggtttcaacatctaagaatttggaaatttacttgacgaattagattaaacgagaagagaagtttaccctctttcttgatcctttcgttgaggttttggatgtagattgattgattcggtggtatatctgccgttaacatcttcgagtgagctcgtgaagacgatgaagattctcgagactgaggaatttagagagagccctaatggtgggaactgggaatgagagagacgaagaagagtaaaagaaatagctgcgtttcaacatcagactatttaacgacgccgtttagtttgttggttcgatttcctaaacttttgtaccaacgtgaatgagccgaccggatggaccggatttgaatttgaccggctagacagaattgaaccggaaatagaatgagtggtcgggattggacttttatagactcgagatcaatttttttattgcaaaattccaacaaaagtcttgtgaatcattttgattcaaatgttcaacaactttttaaaataatgtaaatgatgttgtatttttccagctgagcttgcaaatttgttctgaaaaaagatttaaccttagaccttagtatatctcaatattcatgtgatagataatacaattcacgtgtgagccgattgaatcaaaaggcattaaaaatgcaatgtactaaaatgcctttttgtttctgtgttacatttttctttacactgagaaaataaatcgaggatgtttcactttcatccttgaagaaatatggcaaccattgcgactactagtgaatgatcgatggatccaggaaatatcgttaaccggaacttgcttctccctacgtaaatctgtctcagcttgtacatcaaactcgtctgccaccacatttaaaggaacataaatcagattgaggcaaatgttcaaacacaacaacaacaacaaaaatctttaaaacaagtgtattagaatccaagcaaattttacaagcctaatgaatccgacttcaaatgaacgaaacaaagggttggttgtttatccatcagcaagcatgatccaaacgatgagttttgaacccggtaatcaaaaccagtataacacggtattgactcttgtctagctatagaatgttcaatagtgctgtaattgggagaagatgagtatctttacctgtgcaacaatggaatcttgactataaatggtacaagatttctgaaagggaacacctttgataacaagattttcggacgattctccagcaaaagagacctctgactctgtcttactgaatcttttcgatgtccgcttcaccgttagaaccaaatccttacgcttttccacatctcctttatgtaattcccacactccattctacattccaatacatatacaaagatctgtaagtgttcttatgatatatctcaagccagtgactaactaacaaaacccaaacaatcaaaaagtataaacatcgtgtggactatgtaatgaataatgagatttaaacaagtagcgatgagaattgccaaaatcgatgaaatttgggacgaaggaggcttacgtggagacgagagatggagaagagaggaactccggaggaatcaaggagagatttcaaggaggaagaagatttgcggaggatgaagacgagatgttcggaagaatcggcaaatccgagatcgccggaggaaagtccgggaagctttttggaagcgaagagatcgactggtatacgccggagatcctcagggtcggggtgatacggagtctcggaatcagccatttacatagtctctaataacagtcagaagcgtaaggtagaagaagaacaagagaagcagcttatattcaacgccaatgtttttttttgttctaatgatgtcggatcagatttttttttttgcggcgaaacattcttcttacaccaaaaaataattcagatgaataaaattaagcaagtaaataattggatgtagaagccaaagataataaaatagtaatgataattttcttttacgttcttgagataccaattcttgttttttttttcacacaaaactgaaatgcaaaaaaaaaaactaaaaagtaataacacatttttttgatgtttgatcttgattaataaattaatagaaaatggtaaatgtgttacttacattaggttggaaaaacgtatggtttaacatatgtgtttgttggaaaagatacatttttagtgaacatacctttgacatgaattgatttataaaggtttttttttttgcatttccatccctctcaaatgtttgttttaaaaaaactaagaattatgtataatctttcaaaatgtattgattttattttttttttatgttttctgtagaatatatatatgatgatctactctgttcaaaacatcacccttacatgcatttcagtgatttcacctctaatttcgtttaaaagtggagacacaattttgattcacagccttacggtaattctctttagtatctctcaataagaatagtagacacatttaggcattaactaagactcaaactcctcatcgctctcgctgtaaccatacacatcctctgcgtaatcatcaaactcgtcatctccaaggacacttctcacatgtcgttttgaagtctcctcgtcgtctgattcatcagaggcttcactcttttcttcttctgattcatcatcatcatcatcatcatcatcttcttcttcttcttcttcttcctcctctgggtaatcagtctttggatgatcttcagctgagcacacaaatatataaataaatagtaagtattctttctttcttgactttcggtttatacaacacagagtgaaaccataaatcaaaaatgccaatgatacttgttttcaacgttaactcattagagaaaatatatcaagagaaaagagattgtagtatcaaatgaaaacaatgccctgatttgattctgcttccaaaagactagcgagtactagcacgaacaggagcgttgaaaagcaaacgaaacacacaaccagaacttcaagggtctaagacgttaaataagagtgaagatagtcatatggatgattaaagtgtaccgtttgaatcttcagagtcgtagtctgattcatcagatccatcacagaattcttcttcatcctctactatgacactgaaaaacaacaaaaaaaccatattaacaggtgtgacacaagagacaaagacgaaaaagtaaaggacgaaaacgaatacgcacagaggaaactgattcttggaactatcttcgctgatatccatctcttcgttcacagcataataatcataaacgtattcttcggtgtgactagattgtatatcagcttcaatctcttcagctgctgttggaatacattctctaaggagaggcaagaaactagcgagcattttctggtcctccagggatgtaaacctacagaaagagtaaacctttacatactgtgtttattgaactacagctaatctatttctgactctgagatcttaattacaaatgcacattactaggggacttactcttgtgcattgtctcgtctttcttcagtatcaacacgaataacgtcaaagaaatgacacttctcatggatgccttccttgtttcccttcctactccgccatatttgctcaaaccgagcattctctgaagcaatctaatcagatagtggaacttattattaaatgattacagaagtctcaacttagctatgtaaagtggtgttagatcttttcttaagatggtaatctcagagaaactgtttgacaatgttcttgaccaatagcccgatacctgttgcttttgtacagatttggtcaggcgctgttcctttctctacaggccaaaaagaaaatgaattcaagccatcattcaagcaacggtcaagagatagacaatctggaatcaggactaaaacaaaatgaaagaagatacattgtctttcttgaaagcaattttcctctcctcaaactttcctttactgcaacttttctcattatgatcagactcctgcagagcacaaagtgacaactataagaacatacaaacaacaacaataacctgcagggtttgtaatttaaccagaaagtacactcacaaagaaagagtggataatatcagctgtggtttcagagtccgtaactgtctccaaatgccgcactagcaccttcttcggtttcacatcctctgccacagaaggacctatatccatgtaaacacatattaaagctccactgagtcgaaaccatcatcgtacaagcacataaagcctgagataatatagaattacctctctcccctgaatctgaaatagatagctttgagaaatccagagtcggccgtttgagtggtctttcatttatctccaaccctaaatgccaaagcaatatcagtttttccacttccacacgattgctaaagacagaatctctaccaaacatcaaaggaagagagaagaaacttacagaaagcatcgagcagagactgtccaacttttcgcttaactctaacaatcacaggcttctcttctacctcattttgagtcgaactttcacccaccccatccatggctattccgagaactcttcagcccactgtgaggttcgtgctaaacagaacaaaaatataaacttcaaataaaaaaaccaacaaagagcaaccaacagactaaggtaaaaccaagaaaaaatctaactttcagactttgttttcttcacattggtatcagaaacttctaaagcacatttacaagtaaagtttatgctcgactatggaaacaaaagagtgaaaactccagaagagttctctaattagaggtaactataaaggtgacaattttgcagagctattctaaaaccctattgtggaaattagaaaccagacgatttctccaagaaccctagacatagttacttgagtatatagccaaggaaatcagtttgttttgaagatacagaagatataagagaaaaaaaaaactgtacctttcgagaaaactatgttcggagacgacgaaaccaactgatgaagaagttgtcggagaagaacaaactcggtttcagtgtagagaaaagcgattttggagacggggaggaaacaaaaacgccgcgttttcttatttttcaaaacgtcggcgttttaaaaggtggagtaaattaagcccaaaccgtcgaagcctgtttattttttccacaagcaaaatatggcttcagaaatgtttgatttggctaaaatcagagttttataaagtttataactaaaaagcagaaacaaaattcatgataacaaaaataaattaaaatctgattcaacatattttgcattttctctttgcattgttaatccattcttaggtaggcaagttttcactatttggttgtgtgtacatgatgtttattaatatatatgaacacaaaataaaataacaaatatataaaacctgcccacactatcaaatggacttgactaatatggttttatagtgttgaatctgtgatattaaaatgacaaaaacttataatcaagcgtagaactctatatatgagatcaaagtttgaactttgaagtttgatgttgaatttggtgaacacattgttcttacaactctagttgagaagaaagttgagtattgggattattatcaagaggcatgtattgtgccattatagctcttatctctgagtccatatatgtctgcacacacatacacacacaaatcaatcaaatatgtgtatatccaatattaatgaacaaagtattataatgatttgagatatctgattacccgaattctgtatttataaacagtgtaagctcctaaagcagctgcacctaatcccattattattatccatatcactccccaactgaaatctcctcttgcatctctatctgtacacaagttaatgattagtgaatgattcgtttattcgaaaatatgatgaatgatgagtgtaatatacttatgcaaatgtcgtgttctcttatgtaaagcaagcttccgctgcaactacattcatagcttccccatgtgtttttgcatttgcaatcgcgacattggcacgctgttttctcctcacactcattcacatctgcatttatgtacatcaaaaaaatttgattttgaagctccatatatatgttttatagtttattccaactaatacctttgcactctttgagtccatcccctatgaatccaggaggacatttgcagcctttcgaatgatcatcctaagaacaacataaagataggaataacttttacttctagtactataaacgtcaaaatagatgaaattttgtttgttagtcgagaaatctttgtaaaaattacacggcaagcggaatatgtttttcccatttgagtttgtttccaacatcctccattgtttatgccacaacgtagtgcccccgaagctacaatatccaaatgtaaacatgtgaaacttatatatcggatttaggaatcttagagaatatatatgtagttgaactttttttaccttcacaatgtgtataaccgtcaccgagaaacttgacaccttgaacaatgggacattgacatactcttcctctgaaagtgtcctaaaacattacaagaaaataatactcattttaaggcttgatataaattgtaacaaaataaaagttcttattttagtaccctgcaagctgtaatgttggttgttttatcttcccaacaccctccattgttttgtaaacactcattggtttctatgtctgtcgtccaaacacaaaattcaagaccatacattaaaaatcatgaaccaggtgaaaaagtaaaatgtacattaagtaaagaagaccttcggttaaacaaatgggtggctccgtcgtctcacgaaaccctgagcaaagggccttaagcacggccgatctttgcaatttccctgtggcaatgagaaattagttaactaataatgtttgagtcagactttgaagaatttgcttctttctcacctctatattgtctgttgtttatcacaatagttggtagtatcgtcacatctcctctcgagcctttcccaacctaccaaaatacaaatcaatgaaaacgtttagacttttaatagtttacatctcctgtaaaagaaaaaagaaaaaaaagaagaagctaacttgtgcaacttgttcttctttaagaacaggattttcagcatttgcgtcaatgtctccgatgcatttgtcaattttcttcacatcaactcctactcgaaaacatagaataagatctcaaaacattaaaagtaaaatatgtcaagatgttaggttaccaagagattgaatgacttgatcagcacatttcttgttgtacttctcctctttcatgggacaacgaatggcgaagtcggtgacataatcccaccaaagccaaggctttccactttcattagtcactctaaagaagcaagcttggcgtaaattctgaataattacgtcttttccattgtatcctctggagaaatcttgctcagggtccggagcacaataccttccaccattaatgcattgtgttttacattgtctacttgccagaaacgcttcaggacaatacctaaatatatatcgaacattaaaaaaaaatgttatgttactaaacatgtttgaagagaagatactgagtgaattaccaggtgatgtaatggggagtgaagcgagtgtagcctcctttctcaagaatctgagcagctcctttaaacctcttaagaaaccggatctgtgcatcacatttggatccgcattcatcattactgttggtccataactcgtaagctactcgatcgtttggatgtggaagagcctcccgccagtctagacttatatgaacgggatcgccatgagctatggccgttttgatggcactccctagagatctgctcactaatgctgaaggaattgtgatattttgtaggtaatctgcatctgacgtctcatcctctggtgcgtccatggtgatgagttgctcgggtctgttatccgccaccaagatggttgcggcaccagctcgttgcgcattccacgccttcaaagtaaagtaacaatctgagacaacaacatatatatattaggtgccttgtctcacaagtcaccttttatgaaattcttgtgtgacaagtcttctctttgcattgtaacaaaataatcaaagaggaagagagagacacctcctcgatccacaagaacgaatgtgggcaatccagcgactctggatctgaaagaaatctcaaaatcgtcaaagttcttgcaagctttctgattagttttaggataaaccaccgcaccggacatgcttccgccgtattgagggacgccaaaatttccgagggcacattcatagactcctctgatggactccggcgaagtcactcggaggttgttcttctccacaacgaacctccctgtgcatgaactccaccccaccgttacccatactattacaactaaccatacattcgtcgtcctcatgatcacacaataacttttttgagagttgatttcgaaatactcatcaatggatagccagcaaaatgttcaaaaagcttcgcttgaccaatcattaaagaattgaaactgtcaaaacagtgagcaattatctcagcgtttgaaggaagatttttagatttttgtttctgttttagaatttagttacaaaaatccaaaaaaaatagtttttggttttcgggagagaaagaatgaaatctatactaataataggagtagtttgagacctacgagagtctacgcatagaccttaaaactccttttttttgtaggatgcttataattaaggggaaacttaacaaactagttatatgatccatgatagtaaacaattctcctatgtttctctatttcaattgaagaatataatccatggcctctctttataagaaaaaatggcatccgttgtttacaatcgtatatatatataattctgtataataaaacttcttcaaatatctaatagtttgttgtcccctcacacaacgtggatgattatctagttcattcttatgagagtaataaaattctttcccaacactaatgtgttcttctctcattgctctatcatgcaattaatattatgtgtgacaaacaatttttttttctttcttaaagttggtttataagtcataattaatatcgcaaaggagcttagatttgaatgtttcaattaaggtaggtagcaaatgtttaatttggagatattaaatatgttaatacttaatagccttcaaaaataggttgaagataagccgcatggcaactggagtaacactggagttggtgtcgtctgaaattattggaaatttatctgatgaagaaacgacagttggatatcaaccaactagatacgacttatttcttttttttgctgtctttaacattcttcctcgtatgttcttattcattctttttgcagtgagaaatattttatcatcttaaactatagaatatattgtccatttttcccacgtagaaatcaagtcacaaaagaaagttggtcaattgcagacgagagacggcttagatcctaaaccttttgccatgcttgtgcgtttccgaaaaacaagggcattattttacataattagcatttaatttcatcatgaaacgtagtataagaaaatgaaagaatcaatcacgttcatttttatttaggtgtgaacattaaattgttatatcaaatatttatatgccaattctgtattagtacactttatgtcatatatcttaagaatttgaataattatattgtgccgtacaaaattgattggttagactttaattaaatagtagttgaatataatctatcattgtgtaaagtacaaataaatgagtaaatatagcgttgaattatagcgccatgttattctatacaaaatgttaatatatttttttgtcagaatacgtgtttcgttgtaagtatttccaataatgttgaatttcgaaaatttaaatgctgcatttgtatattattattttattaaatatatatttggtaaagttgaagtttaaaactataaatgcaatcgagaaagaaattggaacttgtgtagtttataattttgtcaaaaaaattcgtgttatcattcaggtttaaatttgacgtaatgtgtttttttgaattatagatgagcataaaatgctcaaaaaaacatttatcaaaattcaggagtcagcgtaatgcagaaatgaaattaaaaaatcatgttcagatgaaagaaaaaaaaaagtacacatagcaaatgtacatgcatgtctgcgccaaatatgaatacaagattcatgtaggcgtgttggtgcacgtcgatgtatctaccttaatatcttaaagttaaaccattcaatagatctggtctgcgaaatctaatttttgtggattctataaactaaaacataatttatatatctaaatggaagagactaaagacagtttactgaacttttagttataagtgacttgttaatctcatttaaacccaagcaataatacatattttaacaattttatttagagtttagataccgaatttgattagtgatacaaagcgatacaaatttttactgattagagaaaacataagtaataatcgattctaaaaatggtagtaaaaaagtatataaaaaactgagaataagactcttaagtaacactttggatattgcttttgtaatcgattattgttaaagtagtcaccccacattgcaccagtataaaattacttcacaaatttaatcaagtatgagatttcttcagtatttgagacatattaaaaatttatgagatgtaataaaagtttttagtatcgccaaatactaaaaaagttagttggtttctttacaaataaaacatgtttataagatcaaaagatgaaaaaaaatgcacatgaaagtcatttgaaattcaacaatattgaatcagtactttcttaaataaaattagtcacacaatataatttactaaacataagtttcttgataagagaacaaaacgaaaaaaaaaaactaaaagaacatgcgcataacatggttaccgaagtattcaaagaaacactcatccaagaaattatgcgagtaccagtcccttgcccacccaaaacaagcaacaattcgaaaagaaaggtaattactttataaaaaaatatattgttttgtctaattaagctgatttctacatttatctgcatttaaaggagggttggattagtaacttctcgaaacgttttttcttctaaaggatttagaggtaaactgtgttatcatgtcctatcacttatcagttgaccgcttatcagttaaaaatagggaatggtttgtcggttaagtaaagataaaaaggaaattatgttaaattcagagatattgattttgatattttaaaaatctatatcgttcaccaaaaaaaaaagaaaaaacacttctctgttaagctttttcaaattgacttaggtttttttattcttttttttaacactgaaacaaatcaaataaaatccaaaagggttagatgagtgcaaatcacagaggagtaaaaaactaattctatcctactagaacaaattgaattaggattttttttgttctagtaggattgtaagcaagaaatttagttttttcttttcttctttatgttgacaaaaatatatatctgaacattatttgcaaaaggaaaatagataaaatgcaagtttttcaaattttaaagtcataagtttcgtctatcgtattagtagttttgctctgtaagaagtttatataacaataaaaattactacatgatgtaaaaataaataaaaaaattactacatatacacacataataccgcaagtaaaacaaattgccaaaattgtaaaaaagtcaacatcagcattaattaacattttaattaaaacccaaccttctctttccttttcttgtattaagctaaccacatcttccgtctaattaccacaacacaaaatcctattaaaattataaaataggaaaataatctctctgttataaatacaactcccccacatatagaatcttgctcctatattcacaatctctgtttctttcaattatcactcaagaaacatgtctcggaagattctcccgtggttgagtctagtcgctattctctggcttcaatctttcaatggcaccaacttgagtttcccagcttactcttcacagcttaaagagcttctcaaaatctcccagtttaagctaaattatctttctttcgcctccgacgctggaaaagtcctaggttttatctccggtatcgccgccgtttatcttcctctccctcttgtccttctcgccggaggttcattagggttcgccggctacggtctccagtatctctccatcatcaagaagatgtttactttatcgttctctcagatgtggtgtttgagtttcttggccgggaacagtatctgttggatcaacacagcttgttacatcgtcgcaatcaatagttttccggtgaaccgtcaagtcgccgtggggatcacggcaagttatcaaggtttgagtgggaaaatctacaccgacatggtccactctttttttcacacgtctcaacgtgaagaagcttcgggttatctcttgctcaactctcttgttccattggtcgcttgtctcgtgacggctcctatgttgatgagacacggaggagacaaaacgatgtcgtattctaaggatgttaaagttggttttatcgttttgttcgtcttgactattgctacggggatttatgcggtggctacgagtcttgtctcggttcctgcggttttagtacttgtaggcattgctctgtttcttcttgctcctcttgctataccaattggagttggatttaaagagcttatgtcctctagaaaaactcaacaaaaggtgcacgatcttgaagctcctgtcgataaattttatttcgtagaagaagatcacacgaaagaagaagaagagtttgagaaggcaataattggagttaaagaagaggtcgagtggacacaactatggaagaaactcgatttttggatatactttggactctatttgttcggtccaacggtcgggctagtgtttacgaacaatcttggtcagatcgctgagtctcgtggctccaccgccaccagttccttggtcgctctctcgtcgtcgttcgggtttttcggccgcttgttaccatcattactcgactacttcttttctaggtaaaaatcacttactttttttttacccttttgattaattagcaagatactaattaaaacctaatcaattaattccttcataatacaactacgttgacctagcacgtataattataacatatgttgcattctttgcatctatctacgtgtttggtctcattcatcgaacaaccttcgacaaatcgacacattctttataatcaatctcctaatttataggaaaaaaacaatatttattctaacattttatttttctttactacaggaacaaatacatgccatcaagtccggtttctatggcgggttcactggtagcaatggtagcttcgtttctcctcctccttattgactccgacattgctctctacatcggcacggcgatgattggcatcttctccggagccttgacttcactctctgtcacaatgacggcagagctttttgggacgaagcattttggagttaaccacaacattgttgtcggaagtattccccttggatctttttctttcggtttgttagccgctaaaatttaccgcgacggagctgctctttacggagatgatggcaagtgttttgggatgcattgctttcaaaccactttggtattttggggaatgctttgttcgatcgccgcacttctcgccgccgttttgtatatacgcaaccgcaagttctattcgcagaagccgtagaagaagaagaagaaccaacaacaagaagttttgatggcaaaccgtagcacattttccgttggtatcaagcaacgcaatttttttggtacatccgtagatttttatttaacctatggaaaccggttaaagtgtaaccgacggtcaggtttttgtgtatatagactagtagaggatgtaaaaactagatatagtaacaaaagcatatatgcattgaattattattgatcgaaatttttataaagatcctttttaattattattcttaatcatggttttatttatttatttaagaaatagtgaaatgtattcttaataatgtttgagagcaaatcaaattttgtttttgtttttggctgaattaagctagatcatttatgaatgctggagaatttaaaacgactttgtttgattattaatggaaaaaaggacttgacgaaatttcgggagagtcttattaatatatgcctacataatattctgttggtacgtacgtagttggtgttcttgttggttcgaacgtgggttattatttaactaattttaattgtaatgtgaaccaggttttatgggaccccaacaacaatcaataaactttcacctaaatcaattcttttcattactttatgatgtccagatatttttttattggtaagtgattattagacatacgtcggttttgcgagagtgacgacgtgaacgttttcacccacaaaggagaactaaaccaatatatggtcgagatcaagacatgcatgatttacgcagcatttaagatttgaacttcatacctatatacaatttatgccacaaaacattttcagtgaacgttaaaatccaagtatccaattgttagtataatctagatacacaaacaatgataaaaataacattttgaaattaagaaaggataattttcatagtattaaacctggtgtaaataacttggagatagataaatatatcattcttttaaatttgttgtcatgatcagtggttaagtccacggaacaacttacaataaatgacaccatacgtggctactgaggaggcccggccaattttaaacaagatattatgtatcttaatttgaattggttagtacttttacatgttggttaacgtagtctagactcagagagccttttaaaacaataacaaaattctttaagaaaaataacccaattgcaaacggtccttaacatgtacatgactactagcatataacatcttgacccattgtagtaaactagtaggtataaaataaatattttataaacatcatgatttcaagtgtttatggccaattttcaacatgaatagtttatttgaatcacgtccgtacaatccgtctccaaggaggtaaaatgactttgccaaatatgtagttcatggctcagattaattagcattatttgtcttaacataaaaaaaatacaaaattaatagtagtttaagataagaaacgttatattcattgatttacttaatgcattgtttttaataaaatgttatttattacaaaaatatttttgtattttcaatatgctgatggacataaaacccttttcaaactaattgaccaacaaaaatttatctactttttttttacaaatttagtttcaatttcttctgtttttgaccatactatagttatatctttatttagatcttgttttttctttttatcttttgttatatttcaagaagaacaaacttacaaaataagagaaccagtatggttcaaaaaccaactcactcctacaaaagtcaaaagttgtccttataaattgtgaaacaagaaataaaaacaacaaatcaaattaattatcacaatgtctacatctaaaaccatagtgtttggtctctttgtcgcaacactcctcgtctcttgcaatgtggctgcaaacgccacaacgcagccgcttttcccagcgattctaatcttcggtgactcaaccgtagacacaggcaacaacaactaccattcacaaaccatcttcaaggctaagcatctcccttacggcgttgatctaccgggccatgaagctaacggaagatattcaaatggaaaagtaatctctgacgtcattgcttccaaactcaacatcaaagagttggttcctccgtttctacaaccaaacatctcccaccaagacattgtcactggcgtctctttcgcatccgcgggtgcgggctacgatgaccggagctcactctcgagcaaagcaatcccggtctcacaacagccaagcatgtttaagaattatattgctcgtctcaaaggtatcgtaggagacaagaaagcaatggagatcattaacaacgctttagtggtcataagcgcagggcctaacgatttcatcttgaacttttatgatatccccacgaggcgtcttgagtatcctactatccatggttaccaagagtttatcctcaagaggcttgacggttttgtccgggtaaaaatctcatatacattattttgtttctttaggtctaagagactaagactagtacgtagttgatatttctttgagtaattttcttatatatgtcgtacgtgttgactctcgaatcttttttttgttccttatgtgtgcaggagctttatagtttaggttgccgaaatattgtggtcggagggttaccaccaatgggatgtttaccaatccaaatgaccgcgaaaatgagaaacattttgagattttgtgtggaacaagaaaacaaagactccgttttgtacaatcagaaactagtaaagaaactgcctgagatccaagcgtctctaccgggaagcaatttcctttacgccaacgtctacgacccattgatggacatgatccaaaaccctagtaaatacggtatataccatttcttccttgtaacgcaagttatctaaatctcaatcttaataatttatgcaatagatactcattgttgtacacatgaaaacaggattcaaggagactaagaaaggatgttgcggaacaggatacttggaaacaacattcatgtgcaatccccttacaaagacttgtccgaatcactccgatcacttgttttgggactcaattcatccctcggaagctgcctacaattacattggcaactttgtggatgctcagattcgaggctggattaaggcttaagccatcaaacattacgaaattcatcaattaaacaatattgtatttcttggaattgacatgacaaaaaattatggccctatagagatgattgatctctgtatctaatgggtgttttgtattggactacgcttagttttcatttaactttactctcatattaatataatctaacaaacaatattcccaatattacattttttgcatagggtacacaaccttttttaatatacctaatcatgaagtaaatcagttactttctaacttattttggatcgaattgtttggatcgctttgtcaatcgttttttttaatctttttattttattaatatatcttaaaaacagtttattataatctatttttctccttttgttttttagactgacgaagatttatctaaaaacaaaaataaaatttgaaaccttcttttctttttctaaaagtggaaagaagttcaaagaatgttctacaacttatcgtatgaagccaagagtccaaagacaataaattccaataaaattcgtatttaatgatcatgacgacgacatgttgagacgaagatttgctgcatcgtcaaaggatttaatcaaaacgaagagtgtgactgagagaaacgttacgaagcaaagttaaaaaagaaacatacaatgaatgattacacgtcttcttgtcatgtattgtgtaaccccaacatttactcattgctaacttccctacttaattgattgtgattttgatatcttatgatacaaactaaaacaaatctgacgcatgattgacgtcggatatgacgccattgggaacgacaagtctctttctccatttttaggacaaccaaatttagcatggatacatagaaatgtacctgtgtgttcgacttctttactttacatacatagacaaaatctcataaaactctgaataatattattattgttccttttttcaccttaaatctccaatgtttttaactatcaaaaacgtataatgtagtatatcaaaaacgttatttgtcaagccactcaaaaagatgtacccacttgtatacgaaatcatgtttacttgttccaaatgaaccaagtaatcttatgagaactttgtgtttgcttttacaatttacaaacaaaaaggtagaaaagtattcctatttttctaaggtaaaaggtaaaatgtaaaaacaaatatgttaacattgcgtttaaactgagagacttggcttaatctgaatcataacaatgtaagaaactttagatgcttctcataaaactttctcatattcaatgtaagtgaaacaattaatcataaaacattcaatcaaggtgcacaaaacgtagatgcaactaatgttagactctctcatagagcttgatgaataggtactgaaacagaactcaatgcttcttcatcatcttctgtcttcttcaaattcatccatggcttcgcagctttccactcctcccaacctttccttacatcttccaattcctcgtctatcaaaccatcattcctatccaaatgatccacccactctttccatggagatttctcagaatccaggaatatactcacctgtggaaccatcactgctctgtaaaactcctctatctccttctccacttcttctgattcacctgttgcttccatccccggcctctcaggcaatctacgcacttcgaaactgtttcctctcaggatcagtacttcagatggagccagtggcaagacaattcttgtgaacttgttcagagatagtcttatgatgtctctaggaagcagctctctcttcactgccacggccgttccaatcatcttccgtatctagcttccaaacaaaaataagaatgaaattgatttagttacgctactttactataagcaatccatgtttccgtatcattatatatacattacctgatgcaacatgaatgattctccccatatggagatctccacaaagccgaatccaagtgaattctctagctttccactacgacatcgaaacactttcctgaaatgagcaccgctaatcttatctgtctcatctggctcgtacagccattttgcacgactgtacacctgagaattatcagaatcaggagtaaccacatgttcatcagattcaccatccacttctttttcttcttcttcttctccaatttctatgtggttctcctctctaaactctgattctgatgctttgattgattttggttctcttggagggcgtccgtttctttgctttattttttgttccgatttccttctgtaccgtgaccgctgtgtatagttatggaaaggatattcaccctacaagtggaaaaaagcagggccaatgaagcaaaaatgtaacaaacttgaagtctctgataaccaaagaaacgatgcaaagaccctcacctcaaattcttttaaaatttcgttgaaatccgtaatgtgatagtcaatctcatctgaagtaaagctattcttgatcccaagaacatcaacagggaggaggtaagaatatttccgtagcgtacactctcttcgaggatcaaatctcctgtgaagatacaaagcttttaattgtaaatgatttaagtatgagcttgcaacctatcaaatgctagaatcatattgcaccaagctcaggacatgataaaagttctcactgacctatttgacggtaaaacactgaaaactctaatattctcaggaaggtgtttgctaatgcatttagcaagaacagtgccttgaggatcatccttccacgctgtctcagggatctccattttcagcgatattgacgttgccaaagaatgaacctataaaacaacttatcaataaacaacaatccaagacatacacaatgcatcagaagacaatcattacttatggaacagagcaagaaaaaaaaagcttactcctttatcagttcgactacttctagcccaaccaatcttatgaagatcaccatagttactatctctaatcccacctgccttgtatatagcaacttccaactcaccctcaatagctacaaattcaaggtgtacataaaaacatgatcttacagggatgtacaagcgaaagaagaaattgcaggaaccaacagaagaattggggtttagggtttatgctaagattcattgtagaaagtaaaaatccaaactttacgacttgaaacttacttttgatagaagggtcgtctctttgaatctgtaagcctgaaaatggagaacaaagtcacaaactttatacagaagaatgcttcaattcataattaaaaccaatcaggaactaaacattcttacctctgtaatcagtacccacgtatccaattcgaatgacgaccttcttcttccgatatgattcccatttatcggcgagaaagttgtcggaagaaggcggtgagagtgaagtagaagacggctgaaatgcggcggaggaagagaatcgtaataacgctggtgtgacccgaataagtcgggtcgggtaccagaagacccgcgatggaattggaattcgtagaaacgagactgccatgagaaataaaacttggctaagtttctagaaccggcgctaacataaaagctccggtgatttcttttgtcaaactacgtgccgttttgtcaatttaaaacacggttttgttatatatattgtaaaacatcaggacgttggaactgaactatatatcaacgtgtagttttttttttatatatcctatgcacgatcgcgttttgggatcgtcttttagaactgaacatttcatattgacaattgattcctacgtagatctaaacttctctaccttattatctaggttgagattccaattctcgaaattgccaagctgtacactcactattcgtgatattcgttagtttttcgttttgtaaactggattacgttaagctcttctctttcaaacatgttttgaaggtactaaccttgatttggtttccacatgattatgcttctcatttatggtcgttaaaagagagccacttaacagttaaaagcttacatttctatgtcattgcctagcagatactcgcgcagaaaaggttgtgggtctaactgaggcttaactatcattcaaactttctgatgatgtattatatatcttaagtcatagtgacttgcctccctgtggttttagttcttctcataaaaatagcttattttctcttgcggcttgctgaaaacatgtttgaagaacgttatttgaaaagtagttaaaggaaaacaactcagctgcattttgataggtgaagatgctttttgatgttgtcattcttttgacaaacaaaagaatgttatggcataggtcgggagtatgataccagacgagctagatcagcctaaccgcactcactcagcaaaagaggtcaaaaagagagagtctgtcttgataataaggcacatgatgaatcctactcaggctaaagaacaagcctatgaagaagagaagtacgaagaaaatatcttgtaacactcacaaagacaacccaacaaggccaaaagagtagttcatgtttttattttgagtagactatcaaactcttttgatccaatcatttccactactcaaacagagaaacactaaagaagtggtatataacatcaatggctataagaactctctatcaaaaaacaccaacaagtgaatgaatcacaataacttgctcttattgttgatcttcatgaatgtttcgaattgcagcagtgattttcttacaatcaaactccatcgtcttcatccaattctcaaaatctccaatttcctaacaaaatcaacacacagatccatcattgaacaaaacaaagaagacgaaacgtgattttgaagactcgtagaaaatagagatgatcagaaacctttacggcgctattaacggcgtgagtgacggcaagccactgatccgtttgtttgccgaatttcgccaccgtaatggcaagattcctaatctccgactcaatccgtttctcgttaacgaaacattcctctactcctccgttcaccgccttcactagcagatccgccgttctcgccgcgtgcctgattgcttcctttctcgatctctctgttttccattttgtgtctctgtgaatctcactttttcattctcgattatttgaatcagaattagctgaggaatgggtcgatttacgtaccggttttttcccggagctgtaacgatgatcgacgattgtcgtcgattagctgtaagagactcgattccagagtttcagactcttcttctgatttctccttctctaaaaaaggtagcatacggccacgcgccgccgagagtgacatcggcgtattcattctctctcgccggtgaattggttcggtaacgattgaattagttatccccgactatttcgtggcgtatcagttaaccatatacttgttgcactacgcgccgttttgattccatgaaacgtcacgcatttcgtcttaaatactactaattatctttaaaatcatatttatttattttttacgtcaaaacaaattcattgattaaatagagttgttacagtgatgtttttgaagccaactaggaagagttctagaatcagaataaaaacaagatgaattacaaccaaatttcgccaaatcatgtgttatcttattgccctccctcttgatgaatttaaattgaatgttactgaattttgctgcccaaaactgaatatttgtgagtagattcgctaacgagcaatgtgaagtagagttattaactagttgtatcaaagtttgataatcttaaaaatcatattttaaaagataaaattgttgtttagagttaagaagattaataattgttgtttcatgtatttgtgcaattagatgtgttaagaagaaaatattgctttctctctttcactttagttttagtatttttaccattttgtgaatggtgaatccaatcctctctctttttttttaagagctacattttctcagtaccaaacttttactaatttcttttaaaaaaaactgaaaatcgtttgatcttcagtgaatctcactaaaatctacaaagttttattgttaagtctttttaaaaaaaaaacttctagtgttttttaaaagatttttttcgtaacaaattttagttatacattgatggatatatcatatattatacttttatatagcagaattacaaaatagtatttataaaaatctaagaaaatatatacatactgcatacatgtatatagaatacattgtgtatgttaacaagcaaaacatgagctgtagcctgtaggtaatggttgagattaagaaacattaatgtaaattattaagagcttgtgggacactgtgtaatcaagaaatactagtactatatgtatgtaattgcgtcatgtggtgactctggaactctgttatgggatataaatagattctgtttgggttatgattaattaattgatcaattaatacctttaattaaaaactatatttaatatttatatattaatgacaattagaggtacgtgggaatgctcgttgccaaatttatatgtttagtcaacgcctccatttaatgttaattctcatgtaatttaataattataagctcataatttcattagtagaatttctcaattttcaggactaacaatatgttagatttctgattctgatttaatgtggaattgtgttattttgtgtaaatgttttttcaacttcgtgttggttactaaaattgtcatatgagtcatgagtaataccctcatgatactaagattctttaccattgtatttacgtacgttagtatggtaatggaacccattaatcaatatgaaaaataaaataaatcaaaagttgaaaaccctatctttaacatggatcaccattcaatctcgtagcttataataagggctataatagtattttaaaaaaattaaggaacacagaattctgatttaatcaaagtaatgaacattattatcactggacagagaattgctatatccagccgtcgaagatggaggaggattatacatagaattggtggcagatgaattagaagatgaagaggacgacacaaccatggacggagatggcaaagaaacgggtggcgtaggcggtggagctggctgagaggacaacaaccttggtggtcgtggagtaggaggtggtggcggtggtggtgggaggagaatcgccgaggcgagagcatgctgatcacaactcactgatgaagttgttgtagtgctgttgaagttgttttggagagaagtgatggtggtggcttcttggtatttgtggcgtaggatttccgtacggacggtcgtgagttcggattgaagagactgaatgtggtgttgaagagctgagattgctcccatgcaaccgtagattggatctctaagtcttaggtttgcttcgtatactaaactatttgctgcgtctcctctttggctctctcccacttcctacaacattttcttattccataagttaatatacatatagctcaatcaaatattatgtacgaaaagtaaataacttaccaatactcaatcttagtatgtatgtgcatcttaggataatgaatttctacctatactagttagataaaccacctcgactataacaaatgggataaatatatgttttgaatatatttggaaagagtcaaatatcaaaaatggtagatccgttcaactatatattcagattaatcaaatacgatatcaaaagagtaatcaaattaagaaaccttaactaagaaaagaaaataaatattcattaatgtagaaaatatgtgtaccagaagcatcttggagacgttgcttgcaccaaagactttatgaacggcagcgaacttgtgaggttcatgcggcgagaagtaaggcgagaaaggacactcctccgcacaacgacggcggaggagcttacaagcggcgcatggtgttacggtgttcaacgttgtccccggaggcaccgccacatgtctcctgattcccatcacggcatgatccgtcgttgtctcgaaggctggatctttctttatcttcttgacggtctcgtagtactctccaaatccttccctgttgtttccaatcattttcaccaccaccgatttgatttatcaatcaaaaagatcgtaaatagatgtatatatgttgatttagttttacctttctcgggacattcacgcatgctatttataagtttattttagagtatcaatggaggaggaggaggaagagaagcaaggaagaagaagaagagtttctttaataaggagagtcattagggtgaattaaatgatctttctttatttaaaagggaaaatctatagacttctatacttaattatattgtatactatatgtttaaagaagtcttactgtcctgctcttgtacgttaaggtattaattatcaatattcgagttatgagtaagctcgagatttggaacagatcataagtagtatcggaccaaaattttgtagcttaatggtttatatatgtaagttttgtaacttttgttattgtatattgcatgttgttactaaaaaatacaacaatcgatactaaaagatatgtggttgaagaagaccataataatatagcttttttggtgatttaatttaaataaggtcgacccacgatcaaaacattcataatatatataaacattagagtaggtggttaaagaaagttagttgaagattaaaaaaaaaaacttaaacaaaacattgcgcaattgtaccagtccttgtatttgagcaagcacaaggtttctacaatcacgatgaaccataccgatttgatcagactcaatcagattatggtttaaacgtagcaactagcaatagtacccgtagaaaataaattttaatccttaaaaagactaattttggtgctataaatattactcattttatatgttaaaatgggcgacaacgaacttttttcgttgttttatctttggtcaacctcttcacgtgttagttgctactaaatgtgaaatatgtcaagctgtagaaaaaatctaacacgatatatatacaaaagacaatggttacaaaagaagaaagaaatgcatactattggacatgtgattgcacgtgaaggatgtttacatctaaaaccccaaattaaatgcttaactagtttatagtttaaatcattgaccatgattgcaaaactattgttcgtgctaattttctttttctctagtgtcaagtacgctcacgttttgatatgcatgactgaacaaaaatataaagtcaacaatcaacatcgagaacatgtggacactgccgatctcatcaatttcacactcttcgataatcggtaaacgaattttccttttctcaagtgtaaatgttgatgttcatgtggacatatatcttggaactaaaataattatgaaatagtattattacgaaagggtttgttgccttgttataacatgtattcgcagaagttgtgtcaattctgttgagaaccaaaagttgaggtgaatcttaattggtgcaactagaaactagaaagcaccactaagtaactttagattacgcaataatggagatttggagactaacaatatggatttttctttcttaatcaacaacaatattcattatacttttgaaatcataaagtgacaacagatatacactaacacaaaatacatactcccccgttttaaattaagtgtcgtttaagaacctaagttttgcgacgtaagttagaaattacgaaaaaacgattcatgaataggctcttggaagaagatgagagactcagattcaaaaggtttgaaatcttttattagatataaaagaaaattacaacaaagttgattttgattttcacacaaattctcgtgtattacttctacgactctatgaaattaggagacatagtcaaatctataaactcagaaactcttcgtctcttcatagatgatccagctctgcagcttggtgatggagtcatcagatctatcacctctacatcaacctcagtcgtcgttgaggtgatatggttccttcttttcctacactctttctccatagcttcagtggatcctatagttccatgtgatacttcatcttcaacaatctctactaagccaaaacaagtgaaacttgctaatctgtcattgaatacagtctcgggttctttctcagtagctctaatggatccaacagtgatatgtgatacttcatcttcaacagtctcttcttcatctaataagccaaaaccactgaaatttgctaatctgtcttcttcatcaaatacagttacaggttctttcgctttttcaaaatgccggtcatccgatgagcttgtatttgaattcccaggctggcttaggttgctactatcatcatcatcatcatcatcatcctcttcattaacctcgggactctcttcatcttcgggttgagaactgtcatctacctttgtgaaatactgaagatcctccatagcacaaacttgaactttcatatgtaaaggtaaacttggagatttaccaccgtggtgtgcatactttgacgagaaataattaaccgtgaggttcaaactgatcaacaagacacaaagagacatataagttataagaaaatggataccaaagcatagcaacaacaacaagaagcttccttacctattccaagctggaagatttaacattgtatatacaagcttgatcttactagcaaccccagagaaggatttgaaagccgcagcagcttctctaactgcaaccgattctctcggatgctgccaagcccattcaaactgcaaaaaggttttttttacgttagcaaaacattcaagagcgaggccacaactggagaacaaaagaagtaaaaacagaatcttttggcaaggaatcttttgctttagggtagcaaaaggacctgaagggcagagacattggtggggaaaccatagatacagagaaccatttcccatggacgtttcttctttgttctccaagcaccactagtgatctctccattgtgctgccttattctccgcctcgggtttacagtgaacctaccaaccaaacccagtttatgcaatcaatcactaaacatctcatagtctgattattaaacactcaaaatctcctatttgatcaaatttaagtattcaatcagataaacccagaaaatgtaaatcctttctcaatcgaatttgatccaacagaatcttcaattccaaaatcagagatgagagaaacaagtacccgatataggtttgacccttatgacgagggctaagagaggtcaagagataacaggcgaagaagccttttccatcttttccggtgactccatcctcaccgacgggatctagggctttccgatttccccttttctctctcatatctcttggattcaattcgaccgttgaagacgacagattattacactaaaaaatccgttttatctcttaaggatgagaatgggccgaaatgtatgattaaggcccactgtattcaatgacccaattttataatggcccaattttttataattcatttcctatactgtattttgttttacttggttcacatgacattgttacccatcatgatagtgataccgtgataggtctcctattgattttagagcttataaaatttgctcacttatgtcaaattttaccgcaactaaaatttcagctttcaaataatctctcctcatattatatcctctttttctttttacttttcagatacaataaatgatggttttcaattttgagtttgtctctaataaagaatttattcttaactttggtttagtagagtttttggtttttattttagctatatagtaaactttgatttcagagagtttggtacaataatatttttatgaggaaatcacccaagtgaataaagagagtttagatatagtcaagaatattcaataagcattctactttcctaattcacaccaaacaacctaatttgccagagtttttccatttgcacctaaaaccaaaaggtgggcagaaactatggtgagatgatattaattaaaattttaaattggccaaacaaatgatgagaagaataacaaaaggctggtgcttatgatgatgctttaataatgataatgattccttaaccttcactcgttttgagttgtaatatccaatcaagtagacaataatagcttttctttttataaagctgcagatttcaatttttgaagttccctgattctatacatactttttaatgctttttcttcactggatgtggaactcccatttcaatcatttcatttgttcaataatacattacacaaagtttttctttcaaaaatgctttcaattctatacataaatattaaagtgaagaagccatatttgataagcagaaaaatgtatagaattgaaagcctttttgaaaaaaaaaaaaatgtgtaatgtatggatttttgagagtttagatgagtttatgcgatttagagattattttattttagtaatttatctactttttattttcaattcattggttattaatctgatttggttatcatgcactttaacttaatacaatttgcatggttgattttaaaaagtagttatgtacaaatgtgtaaaattggaaaatccaaactataaatagaagaacattttctacattatacaaaagagtgaagtatctacaaatgcaattttagacttgttgttgtacatagtaacacattgatcaaaaagcacaaaatagatacctacaatttggtacagtatttaaatacatacattaatttttattattttttctctgtttttaattccgaaacaaaagtagtagaaaccaaatccaaccaacgaaacgcgattggcgttttaaaattgaaagcacggtagaaaacttcatagcgttcttttaaatagccgcgtttgttgacgacgtctgatcgcaaacgcgaataagttgaaccctgagtttaccattccacatctccttataacaatcaccatcaccacctctccgccgtgcctccaccaccacaagcaaatcattcaaccgcgaaatacaaatcccgataccaaatttcccattttgcccctccatctcaaacccatactcttcctccttcttcttcttcatcctcagattctcctctctcgcaaacccctccacttcctccgccaacatctccggcgacttttccgataaaaacctctccgattcaccactcgaattactacaaccagcaaacaatcccgacaaatccaatcccgacgagtaagaaatcaaatcaaacgcgtttaaactcttcacagcttctagtgacgattccactttctgatcttcgatctcgtcatcgtggaacttgatctgtttaaaacctcctctaacaaaccaaggatctttcaaaatctcatcaatggtgattctagtctcaggattaatatctaaaagacgagaaacgaatcgtttcagatctggagacatccaacgaggaaaacgatactctcctttataaatcttcttatacatattcatcacattcggatcgttaaacggtaaataaccggcgacgagaacgaacaagacgattccacaagaccatacatcaactttagcaccttcatatccttttttagatagaatctccggcgcaacgtacgccggagtaccacacaaggtatgtaacaacccatcgggtcggatctgatccgttaacgcgcttagaccgaaatcggaaacttttaagtttccgttttcgtctattaatagattctctggtttgagatcgcggtggtaaacaccgcgagcgtggcaataaccaacggcggagatcagttgctggaaatatctccggcttaaatcttcgctaagacgtccatgttttgagattttgttgaatagttctcctcctttaacaaactccattgcgaagaagatctttgattttgtcgccattacttcgtggagcttgacgatgtttggatgagataatcttctcatgattgagatctcgcgtttgatgttgttggctagagctggatttgtgaggagttttttcttgttgaggattttcacggcgacgctttggccggtacgacgatcacgtgcgtggaagactttggcgaatgcgccgcatccgagaagctttccgagctcatatttaccgaataaggcgtcgttgttgtcgccgctgccggcggcaatctcgatctctggcatgattgatgaatccagagattgattgatgaataagaaaacttcgccggagaatttgaatctgtttcgtttgcgcgtaatgcagatgtgatgaacacgtaagctaattcttcttctctttttttttttttggttttgttgtgaatttactttttatggaataagaaatttgaaagaaagtggtttaggtatttaaatggtggagaagtgatggcgtaacgcggaagcttttaaaaagataagttcgatagaataataatggattaagggtataaaggaattagagttgcctaaaaaaggagtttaactgaagcactattatatgtaaccgttacagaatttgtttgttgtcaattaaaaaaataaaatgttaaagtttttttaacccaaattttatatatgtgaagcagtgaaggtttactgttataattaactgacacaactacctgagcacacaatccatctattcaacacatgaagccaaatttagccgataatgtaattgatagtcttcacataaagcaactgttcttgagtcgatgcatatgtatatctagttccttaaatcatatagttttttcattttgtacaatcgatctacagactacagtgtacacctaattattacgtggtttttgtactcactcaattattatgttgtcgatagtttctactttatttcctctgcctacgtgtcatgatcttatcacttaacttactctgatcataactcttctcgtactttttacatctaaaactattcagaatcttgtagtattatagttagaagaatgtacatcaataaataattgtttcgtatatcagttatttgcgtgtctcatcgtatatggttgtttttttattcaactcttaggtaatgaagaattgaagatagcgacttggttagtaacttatactaacaaaacatgttccacgaggtaatggcaggtgtctctcacacacgtggcaatatccgaacggtggaacaagtcgacgcggcgccggcttcaagctggacggttctggatcgtgggccggctgttgaaaaatcggtgctgagatatgtttctattttattttattttttaataatcgctgattgcagactaattatttctctattgtttgatctgattgactaattatttatcagttatagactaatagccaggaaataataacctttgctcgcgtcggtaatttgattatttttctaacatagaataagaaagaactttgcaccaaaaaaaaaaaaaggaataaagaacatgggccgtaccatattcacatcctgattaaactttcgtctttacataaaaaacctttcaataagaaagaagaatcagtcagtcaatgactgcgactttaaagaaaaaaaatgaccgcgagtctgcgactttaaatccttcaaacttttatatatgggctatgtgtgagtggtgtaaggtgtatttggatacgtaatacgttatacgttagcatatgttttcttgaatattatcagtgtgtacgaatagattaaattgaacgagctgagactacagaatttaaatgaaatcaacgagtcccgcagacagatgttaatagtttacttatatgtatatgctaagagtaatgttattgggcttttggtttatttatgttagtccatatgtttatgagcctaaacctatgtgatacttattagaaagcgagtacgtttttttattttttgttcattataagcaagtacgttgaagaagaagacaagaaatatgtttccttttgacaccaaatgttgatattattcatgaattatgtcaccatatacgaaatcatatgctaagaacgtcatatcgtctatacgagcatcatcaatcaatttatcagcaaaagtttcacgttgaggttgtcctagcaacatgtcaatgtataataaatatttggagtagaggcaagatataactacgaacatgcatataattcatatatataatgtatatatgtgagtatatatattataaaagatcatggcatgtacaacttgttgccgcacttgcatctccaagcttccgggtagtattcggcggtgacaggcgtgccgggaggcaccggaacgtgaacaggcttgcacggagtgcatcttccacacttggaggagcaccgtggtggagatgagcccaatccccttagaatcctccgtagctctgcctccttgctccggtcaccgatcttcctagtcttctttatcactacggtactcttgccttcctcctgaacacatactcaaaacgtacatattatcacatttttcattactaaatatatattcaaacgtatacatatcctaatttattattttcttcattaggataatacatctagtaaaacaaaccaaacaatatggttaatcaagaataattagtattttctaattaacgttcaataattagtatcttctagtgaactcaatttcagctgctatcaacataagatagtgagaggactgcgttactaacgtgcgatttcatgctgacatacgcatattattgttaaaatgcgcagtttaggtaaaaaacatttttaagacagggttggggatgtgagacaagacgcgggaaaaccgctccggaaaaagcgctacgcacattaccaaaaagggcagagagattgagaagttccaagagcctgtcatacgttaacgtgcaccgtgggggctaatattaccactcgatcgagatcgtaagcaaggcagggtcccacgagtggtgaacgaaccaaaagttgagtactgtccttgtcctcgtgtgcgctgaaaccaatccgacggctgagaatttctttaggagtacatggcatctctgcatgcccagtcagtctcgacatgccgtcacagtcgctgactgttcaagcgcagtttagccacaacccttttgtttgtgtagtccttttagagaaccccgcattataagcttatattatttatggaaaaaaaaaaaaaagcttatattatttttaaagtgtgtttaatgatgaatcaacatcaatcttgtcctccaaagatgcttgaatcaggagaaaatagaaactaagctttttttggattttatgtggttatagttatgccaaaaaaaaggaagttaacacggtttttgattcctatttcctaactaattgttgactcaacagcaaaaaaacaaaaacaattgttacttgttagatcacgcaagagagtaagaggtataaacagtttacgaacctttgcatagaagttccctagtgtcccagagttagaattcctattatctgcatttttacaacaagataatatatgaatggtactgtaataatttatgttacgtaaccaaaaatattctaagatattaatgtttgagaaagttgataattaatatgataacgagaaaaagaaagatggcttacatggagaagaagtcgaagtgggagttatagtgaaggtggcaatgacacagaggacgaagaagagtagcaataaatagaagagactgaacttggctctcgtgttttctgatggttgtaatgatgatggtaatgatgatgataataatgataatgatgatgatgttctctcgaaacccataattacgaaactttctgaaaacctaagaagaggctagcagagattagttatgatctcctcatccatgcgaaaaaaaaaacttggtgggtttttaaaaaacttgagatgaaaatggaaatcaagaaaagattattgaaaaggaatattgaatgtcttttggtttttatgatttgggttttctcaaaaaacgagagtgagtagtgggagtggttgagagtgagaaagagcaaatggagtcgactatgagagatagaacaaggaggggttaactgcaaaaatgtgtgattaaatatggaaatttatatataaaaggataataagaaaagaaataagaagataaaatagtatatgagtgggaaatgagagaaagagtgtaagaagagagaagtaattaagaaaggtacctaagcattgctaagtttgggagttagattctcctgcaccctattctctctgtcattgtacccttcctttcaccagaaattgcttttagcaatcttccaagctatacatatatatacacatacacactcatatgtttatctattgtatattttatatgtagttatatttcttgattaagttctttcatatgcatgtgtgtagggtttaacatatcataagtactcaagattagggtttcacttagtttattattattgttggggggggggggggggaaatgactgcttggtagaaacttaaaaaaaaaaatcataattaaggtagagagatgagaggtgattgatttgaagagagatgagtaagggagggccgtaggatgatatatgagtttgattctaaaggcaaggaggtatggacaaaacatcccaacaaatgtgtaagaagggttccatgttcattcctaaattacacatttatatatgtagttttaacaataactttttactcctatcaattcaagcaaaggttatatactaaagattcttaatagtataaatagaaaaaacaataactgttgaaacggtactaaatatatatataaaaatggcaaacaagttgcagtataaacttttaacaatgggattagtaaattcttttttttttttaattctaaaagaaagctattagacaacaaaatatttaatgattttagcatgaagcatgagagaaactaatattttggaaaaatttataggttatcaaatgtacatatatcaatgcttcaaaatttcttgttacgtttgacaataccatttttatgcggtctagattatgcaacaatataatcatcctaataccaaatattttatttttatgttgaattggtaatattatatctagtgttggtagaatacgtctgattacaactatacaattgaacgttcgtgaggacatagtgaaccacaactgaaaaaattgtgtaaaattaatggttcatatgatcatatctaatatactagttttgtgattggtggagggaaagaaatcaaaggtaacatgcccaacaaagctgtctcgccttaagtttctataaaacaaaatctgaaagttttttttttgttacaattaacggagttcaaaaaaaaaaaaaaaatagagctcaaaatgtgacataaccattagtccattagaaagaaacttaagatgaagagaagtaatataaaatgttaaacaaaatcccatatgttctttacatatatataggtttttgatttacattttatattcttaaactataattttgttataactaaaggctatgtctcttaaaattatttctttgatcatgtgtcgagaaatattaattctgacgtgggtttagaagcttttttgtacatttaagattgtgtgatattagatcggacaatatcaatttttttttgttttatttttcttgattaagttatttggaaaccccaaaacatagctgatagccttgaaagaaagcgaaatttccattgttgattgatcacttaaacataaccatcaatttaaaatctatataaaaaagaatcactatattcaaccgtaatagccttagtaaaggggtcattctttcggattaacatcgatttttggttgttttttccctttatctccaccaacataaaccgtcgctgatgaagactcttcaagcaacatttttttttcaaattaaaaacacgttcgaacgagaagatagaatactcgaattctaaaagattttctctgataccacgtgaaagaatagtctttggtaagtatgttattaatcgtgtaaggtggtccaactatttatacccaaacaatcgatgctatctgatcaacatgagataacgtgtttcaacaggaggaagtgggtagctccatcgactactaaatctacattatcttatactttttaatcctatatcacaatagtatctctctaacatatactatatataaagatagaaacaatgtagaaaaatagagaagaacaactgaacaaatcgagggacttttttttgtgtaatatagttttgtttaaatttgagacattaatagttttataagtttttttaaaaaactgatattcgatttaggcatgtacatgtattattcatttattctagtgtgttatactagtggtactaaatcattgttgtattacagtttaaatatggatatgcatatgtgggttatattgaaacaaaattctttgtggataaaaggaaaattttaaaagtaatatacatgagctgagattatacttagaatggtcacataaaattgttgatcatagttttatactatctattatgattgaattttcttaactctaaatcacaaccatactaatagtcgactaagagagaatacagaaatattcatgcataggaaaatattgagagggccgggtcacatgccaagttaagtatcgctatccctgacacaccacttctcaattatttgataataaggtttaatacaaagatctgacacactgtatcctttttcattttatcatcttattgtaatttgaaatttcattttgtttcttgactgagacagatgggacttgcattgtttcctatctattatgtactgattcaaagatgtcaaggatcatgcagaaagaagacattattttttcttagaccaataaaataaagagaaaatacatatcattcttaggatctgaattatcacgcaatcaccctttcaaaaatatgtttctaaaagcatagtgcaatttgttattaaaaaaaaaagcatagtgcaaaaacaatgagaagaagaaaaaaataacacattccggaagcatttgcaagaggcataactttacaacttatttaattttataaagggtcatttaagatttagaggatcagtttttaggatttataactaaaattttagggttaaatttataacttcgagtctagagtacttaaggttttaggatttagaacatagaatttagggttatttgttattagttttagaaatataggctactctcttacatctccccctaaaaaagattagactacgtacttttttaatatccttttcttttaagattcccataatagtttaagattttgttaattcgatttatctttttaatccaaattgtttggttatttagaaagctagaaaagtagttaaaatttgctagttctttatcatgaaaatacaagatttggagatgaaaagttatacttcaaaattctcgctaaacaagcaattctaaaataaaataaaaatttgttcactgattagagacagatttaaaacaattgttaaaaaaaattcaaaaatttagatgaatatatggtagaagcgggtaggcgttgggagtctatttgtgggccgaatggttatggatccaacgtgttaatgtaatttaattaatattatttcttccaagttcacaagatagtttcaacttcagttttgacatttctttaaattgagctaattccagtaagagaaattttgaaaacacaaatggatagatattttggctataattttttttgcttgttgaaactttatagcatatttttttttgttaaaggttttcttgattttaataatacaatagtcaaccaatattaaaactttcccaaaaattaggatctttcatccactatgacaatttatttttagtggatatacactagtcctatacataggttcatcatcagcaacataaactatgtgtgttaattgatagtagctagaaagcctttcttcgtatctcagaagatatctagagtagatcttatgcttatgatatataggatagatatcttgtcatactgataaaacaagtccgaggatgaggaaagtgatagagggagagagaagaaaagaaaaaaggtaagtatgcaaatggaaggaagccaaaagttgaaaagagaaaagaaagagaaagagacaagagatgcacgagcgttttgaattcatgccttgtgtgatttcagtatttggaccacttcctctgttttcttcttctccttcatgtagcatcaagatatagtttagtatcaagattgaagattcacataagtctagtagcatttgcaaatcttctttcacttgagctaatcgtatttgatcaaactgatcgctttaaaatattttgcttgtaatatacattataaatcctaaagtttaacagaaataaggtatatgggtctattttaaaacataatctctactagacatgatcgcagcttgtcttaattaggaccgtagaactcacaatctctacttttaaacattaatattttaaaacatatttttattgctcaactaggttccaaatgaatggattgagcaaaatttgcaaattaaatccgtttatatgtatatttaggtagttttgttagcatgatatgactgatcatatcatcgtattatatagaggtttgtggataaaaaaatgaaatatatctctattagttgaacatatgtactacatgtgttagtgtgttacaatagtataacatgtgtgtgagtggattttaattatttctcggctcaatgattttggaaacaaaacgtggtgattacacgacaactttgaatttcaagtgaatcataacaaagtagaaaccttggctttcttgacaaggagatatgtaatagttgctctctcaaaacatcagcaggatcaaagaacaatagcataaaccagcgtattaagggccctttatgggccaggtagagccttaaataaggcccagcaaatattaatatgtctttgacgtttgtcttgggaccgagacgaataaggacagagaggagattacaaacaaactcgcgtgcaaatcagcagctttcactactttttcttaaaagtttgaacatttgaagagaaagcaacaaacaagaagtgagtgtaattagatttactgttacactaatttaatttaattatacggttaacaatttttaatagtattattaagacagactccaagaaaaaacaaagggagacaaaggtttttgtttctccgggacggtgtctgtggagatccctgaggggttttctcttggattcccagcatttattcaaaaatgacaattaaatacttaatttttgaaaactggtgaagatcaaagtttttgattctcggaaataaaaaaaataaagagaactaaacgccaattatagtagatttattatttaggaatccgagaatcatatcaccattaacgaggctatttattttgtcttgttaattaggagcaaaattttaaaaagaagaatataaacaaacctcattccaatgttaagcaacacgcatatcttagagaaagaagcacaaaggctcaaactttggcacttccttcctcgtgcttagcttcttgctttggctgctactagtgtacaaaaacaataaacaggtgattttgttttgtctttcgtttgttctctctatcgtttaaatggtatctttcttattgttcttgttcatcatttgaatctttatgctctgttcttctagcttagctttcacgtttttttgaccaatttgatcagtaaaatcaatgaatggtttcgtgttatggctttgattactaaaaattgaagattttgcaatcttttagggattttctttaacaagattgtacctttttttgttggtttaggtttagggtttcttcttcagtcaatggacaatgccgttgttaaaagatcaagtccatcttcgaatatatcagaagttatctccaagttcgctaaagtctgcaaatttagatccattggtgtgttccctgaccaaaagtccaattcgaatgagatcttggtggatgataaagcaaaagaaactgagatttgtgatttcaatcacaaaccctcttcaatgattcaaacttttagttgggatgatggtgagatatcgaagcttttcgacattgtttcatcgcttaagctagcgtatcttgagtttcaacaagctcatttgccttatgatcctgacaagatcattgaagcagacaacctcgtcgtgtctcagctcgaggctttacgaagaatcaagcgtctctatctcaaaacgatacagctcaacgcaaagaagaccgagattgctgcttcttgtttggataggttgagatatgagattgaagtgaatgagaagcatttggagaaacttaaagcacaagtgagagctaaggagagtgagatacactctttgattaagaaacaagaatgtttggttgcagagaataggaaactcgaaaacaggattgtgagtgtatcttcctttgaattcgcttttcgagctgcttcaaagtcggttcacgactttgcaaagccattgatcaccctgatgaaagctacagattggaacttggagaaagcagtggaatctatagttggaaatgtaacatttgctaagacctcagataagaagtatgcttttgagtcatacattgttcggagaatgtttcacggcataaagcttaatccatgtgatgtgaccgaactaatgagtttcgatgatcctttagacgcgttaacagcgttttcagattccgcgttttcaagattctgcggtcagaagtatcttttagttgttcatccatcgatggaggcttcattctttgggaatttggatatgaggggactagttttgcttggtaagcatccaagaacgatgttttaccaaatctttgctaaaatggcaaagtgggtatggattcttggatcgtttgcagcttctttagatcttaaagcaaagatctttgtggtcagaagaggaaccagtttctcaggtgtctacatggaatctgtagtgggtgatgaaaaagaagatggaagaggcgatttaagcgttgagttcgtcacaatgccggggtttaaaatcggagattctgtatttaaatctcaggtttatctttctaaaacataagagtaaaaacaccactctcactctgcagatttgattatttcaatagtttcatgtaaagagctctctgctttttaacaagttttgtaggtaagtaaaagaattctttgttcaaggatcatttggtttgtattattgttcacattcaagttttggtctatagttaataaatccaagtttcttcgttatgtgaaactaaaaaacatacaatcttttatagttttcacacatgagctctccatcaaatctgtagacaagttcagtgaagacttgaatgtgtatttataaataaatcgtcataattatccttcataattttacttttatttgatctaaaaaaaaacacatactcactatataatttagaatttatacgcaagagatttaaaattataaaaaagcaaaaattccatatttatcaaatccatacgattttagtctactttgcatccccgtaccaggctgggtcaacgttttgaacccttgcaccggagaattcttaagattcccttccggcccaaatccagtagataccagtcgctatgataatcatcgcgtaattgaaggagcatcttggttggcttattaccctggatattgggccatgggatttggtaaagacaaagttaatggaacctataaaatagtgaggatgttttatgatactaaccaattcgaaatccttgatttaacaattggtgaatggcggacaatgccgaatccgcttccttactatgtccaaccaaatcatcattcggcctttgtgaatgggtccatctactggtacgacctagttactggttacaagattctagctttggatcttcacactgaacagttccgtgatgtcccaagaccgcatggatcacctacactcgccccactagccaaccttgaagatcgtctagccatgatctgtgactatgagccatctcatcattggaaagtagccatatggaccatggatacacaagaagagacgtggactaaaagtctaaaacttacaaaatacgtttactccctggatatctttgccccaactattcgatgatgaattgcattccaataacggtttccaaacaagggaatgtttacttccatgacagcgataagcggttgctcaaatataatccaaagactcatgaagtctgttgtgtagctaaacacatcaatgttttatttccttttgttgaaaatatgatccgacttcgacatccgaaaaccaccatgacatatccacccgggtttcagtatgcagactcttggatatctaaattttgtagacggatagaattacctattttgcttagcacgactgttgttgctcttgtaatttttcgtttttcttctagttcgtctaggtcttagttatgatgttagtatctattgtaatactttttctattgagagttgagcttttagacttgatttcattcattgaattgttatacactgctatgaactatgcagcagaaatggcttaaactggaaaaaaaagtattgtgactcaaacattcacgttgcgaaaaagcatgccgattaaaatgtcaacatttaatgttttatgaagatacagtatgaagtatttaaatgtcaacatttctacaacagagaagaagagagcataataacatagctggccttattccacatgtgaaagctcacatttggattcttggattgggttttcatagagaaaaagactatacgttatctttattataatgaaggcaagatgccccactgatgcagaaacccttttccggtggtgacttcgagcaccaagagtgctagcaccgctaacattgctgctcttccgttccatgtttctgcactttttgtccatccccattcccacattgtcaccggtgctggtaactcccttctctgtgaatcatacgttgctaataattcttctacactcccgagcggaactaacgactgcccaaccagaaaagaaaagaattagaagtgaagataacagattcttttgtggagctttaactagatgtaagatgaaaagtgtttgttacctgtcgagcttcaaggtttgagacagccatagcaccaacgtatggaagactttccacaacagcatctgccaagtcagatataaacataggttctgttcctagagcaggtactcgcccccagtttttgataccagacttcaaagccaactctttatactcaacatctatctcctccagagtttcaatgtgctcgctcacaaaactgttaaaatagaaacaaacgtgagtttcaaataaccagagaagagagaatttgtggcagagaatagacagatgattaccttatgggtacagccagaagattttcaacaccttttttaccaagttcagtaatggcttcttcagtgtatggtttcagccattcaactggtccaactctgctctgttaaacataataaaacaacagaatgagtgaaatttttgacaaacaactaattcgacaaaaatgggaagtacctgataagcaagagtgtaagcattagttatctttctcttgtctaattcctccatgattagatcaacacattcttccatctctgccttgtaaggatcaccggcttcttcgacatatgcaagaggcacgccatgtgcactgaaaaatattacaacctgtaacatatattttggtttgaagcacgtcttaggatagttcaataggcaaagctagaaaaaactacaaaagacttgaaaattctttctttccactagtgagcagacacaagattgtttacctgattaggagaaccaaattttcccaactcgctttggattagatttgccattgcctttatatatccctcccgctgataccacgatggtataacagtatgttgcatgttaacaagatactcgtcctctctattaagcacagaaaggtaaatgattaaaacagatatggtcttggtatactaaaatatgaaagatgtgcgagcctcaccgaaatattctctccaagagtcttaggcttgaaccactagttgatatagaaaattgaggataaagtggtagaacaactagttttgtaattccatctctttttatctgaaacaagatatataaagaaaacgagtaagactcacaaagtgcaaactccaggtgttcacacatacttcaatcattattttgcaaatgctgtttgataaaaacacaaaatgtagtggtttactttaaatgtaagcaaatatttgaagatgcaaatacgaaaagaaaactttgtgttttagccttaaatcaagatactaccaaacaccatattcaacatacctgttcaatggcttcctcagtgaatggatgccaataccgcataccaacatatacctttgctggtacatttttttcccaaaggcattttcttaattcttcagcctggtgaaagtataacaggtacaacataagaatgtataaattttgcgtcatctcaataacatactactctcaagttgaggtgtctcacacaagcacaagcgatttacaaaataaagcaaactgaaacactttgggattataactagccattttacttggatgcaagcaaggagaaacttggacaaaacagagcaaaagacaatattgttcttgaaatttggtacactaactaacccgttttgatttcagtacttgaaacttggacaaaacagagagaaaagcttctaaaatgacaagaggataagaaaagcagagtaaccaagatcatattggcatattataactaacctgtgcatcagttatgtggcgaagaggagaacctccaccaatagatgcatatccttccttgcttttgggtgctcttgctactgatataaactgtgctaatggcttctgaagaaactggaataccggcggcaaccgtataatgtcctaacaaaagattgagtaacgaacataagtcgtatgaaacagacaaagattgtatctttacacaatcaaaaacatttcaaggatgcagagaaagatatactataccgggtcggcgaagaggttaaacaaaaagggttgtacatcatctaaagtctcaggacctccaaggtttaataacaagacaccaattttggcatcatcagtgataacagaggaagatgaaatggcatcagagataactgaggaagatgaaatgtttaaagggttcgaagtaaccaaagctgctctcaaaggcaatgaatgtttcccaagaagccggtttgatgaagtagcagcaaatgcttcaaagggtaatcttgtgcagtgcataacaacagatctttgtgaatcgttactcaattgtggcaagagtctgcatataacaacaataaacagagaacactaatcagttgcaatgtggagctaacagagattataatcatcatccaaaacttacggaggaggaggacgaaacgttgagtaggaagaagaagaggaagaagaaggagaagcagtcatggctgggcaattcattgcaaaaagattgaaacttgaagaaaccttaacgcaacgatttggatttggaggagctagctacaaaaatctcatttatatttcttcgaatttgttttattttttcattaatcagaccagacacagttgggataaaatgaaaggggcttgaggagtgaggacggagaaccacacgtgtccacacagttgtgataatttttttattcaacaataaaattgcaagagacgagtttggtaagtaaatccggttgaaccggtccgaccggtattgaccgaaacatacaatcttttatagtcttcacacattgttcccaactttaaacttagaaaccttagatgttgtattcaataattgtcaaaccacaagtactgacagatacagatttaaaacatttttgttttgatcaatttaactagatctgttcattcacctgaaaacaagtctctacagagttctccataaaatcttgagacaagttcaatgaagacaggactcttaagattcttccaacagaagagaagttcctctatgtccattaagtcatctattttcccttcttcaacaatcagatgaatcagatagttttcaaagcttctacaagcatcttccacagcattgtcttcaaatgtatctcttgcgttcagcgatttcctggtccgtgaagagtaaggtgtcgtgatgggtgaagtgaagagcttcttggctgttgctggcgtaagaggtgattgcataaacttggagtaatcatcatcgttcacactaactgcaatggcaaaataagagaacaaagagatcaagaagctgataaaatttcaatgttaaaacagattttgtagcgaagttgtcttacaagaggaacttctatgtttggcgttgctcatcttatggttcttgcttgaattgaggaaacagagacaagaacagattggcttcttggaatgatgatgttgatgtctaggtttgacattgccatgacgggcacgaagaggtctaataaagacaggtcttttaactcggaagcggaagagagagacaaatctgttgcatgatttcgaaagctttgatttgaagttaatcaaagttgctttcactctcattgtcttgaagcttttttggtgatgatgttgttgttgtgatcctctttggcttcttgttttgttttggtgtgtataaggttagaggattggcttgtgttgcgtggagttcacgtctttgggtgtgaaactgatcatgatggtggagtcccatgaagtttttaaaaacaatggagaatagaaaaggttttcttattgcaaatgtttggtggctcttgcttataaacaaaatccaatatgatgagatagttttgtttttgtatactcaaaaagtcgttgatatattggtaggtcaacattgttgaacataaaccagtcccacgtctagtgaaaatatctccattttttaaatatgaataatcacttgtgcttatttaaagtaaggatggaaaatgttttattttgatttttgaatatcatttttttccttctcgaagttaaaagataagtagttgccaaaacatttgatctggaaagtggaaatgtatagaagaagaaaaaaagtgtcctcaaaatgttcggcgttagtggacaaagtagaccaaaaaatttctcatattcattattatgactcaaaagttgatcccactttattcagaggagaaaatggaacatatttgattatcttaatttcatcatttgtgtatctgtatcaccttaatataacataaagtgctactatactaaattatttctacctaaaaacttaagataaggttcacactttaccaaattcaaagaagcatcgaaatgaaactattgaacttcattataacgtgtactttgagtctttaacctagatagattcacatatgttaaacttttagttgaattgtgaaaactttgtttttatttattaaattgatttgtccgtttagaaacgttttaatattttcaatcaaaaagcatacttcgaggaaaagaagctgtatttttcttttgtaattgccatttggtcaacctttttgtgtattctttaaaactgtttacatttgctactgttttataattcgctaattacatttttcagttattttatcatttcgatgaagagtaaaatctccatgaaatgatgatagaaatctgtcagaaatcagaagcaactgattctctgttttataattatttttgtactattcccttaattatataatattttagataaaagttatgttcttatgattttcagtttttcaccaaatacaatttcaattagtcaaccaattttaaaaattcaccataaaataaatttattaattatgtgagcacaagcgtgtaaatgtgatgtctcaagttgatgttgatgatgaatgatgatgatactaataaaagacattctttaagctttttctagtagtagccccactagtttccaattttaatcttcagtttcttctttatctgtcacatagagaactttgctttctcaccttcttctttatctaaggaaacaaaaacagagttttcttaagagaaatatcacaaacttttgtgaaaaagagagagacaagatggggaattacaagttcagaatttcagagatgctcccaaatgcatggttccacaagctcaaagacgtgactaaacactctaaacccaaaaacaaagcttcttcttcttcctcaaacacttgtagcaagaagaaaccttcctcagattctcttcctcaacactcttatttctccaacagcttagtagctaacaatcctcctcaccataactcaccaagaaactctcttcacacaaaaaagatgagtaaaagaaagacactttacaagccatcccttaaacctttgactcctcctcctcttcttgtatctgcaagtttcaacaagagcaagatcaacgatcaagattcgtcttacagcttgttcccggctattgaaacctcccctgagtcttttgtgtatagtttctacgaagaggatgatgatgatgagttcgttgaattttccaacttcaagatcaacacaaagaacaaagctttcaccaagcagaaggtcaaagtgattgattcggtagagaaagcttgtactgcaagcaagccgattaagaaaccgcagaaaagccatctttctgtgaaaatttcaagagatgaagatgataatgaatataaagccgagaagaagtaccaaaggcaagtttctagtggaagaaaaccatctgctgggataaacctcaaaagagtgaattcacctagaattcaactctcaggtactcgtagaagcacttctagaagatcagagagcaaacaagatgttctagagagcttcgctgtgatgaagcggtccgttgatccaaagaaagatttcagggaatcaatgattgagatgatagaagagaacaacatcagagcttcgaaagacttggaagaccttcttgcttgctaccttactttgaatccaaaggagtatcatgatcttatcatccatgttttcgaacaaatctggcttcaacttacaaaaacaaagtaaagaaaaaaataattcttaatgtaatagtagttaacctaatggtgaaagtaattagtatcattctgcttgtgaaattgtagttgttgacttgttgttgatgttcataagaagttagatggaactgtggagattctctctttgaatcccactttttatgtattgttttctttatttatctttttggaaaatgtaagcaaataataaaagttgttatcatattgtcgttttaatacaaacatgatcactaagggcgtgaaaacactgttaattaagacagatttttttatcactaattaaacatattcttgtcttctctatgattatgaacatataaaactactcacaaaagatgatgcttcaagatttgattatttcttagaatatgaagatggattaattgcgccaatatcatttgaatattttgaaaatacaaagttgaaaatggcggtaaacagcaacaagaaaaagacaacagtgaagagacatgaacaatttgaaaacgcaacaagtacggagtttatatatatgcatgaagaacattggataatcgttgaaggtagagagaggaccactgacacataaaactgagatgtgattaaagaagaaagaaacagtgatgagatttaatccttaagggtttttttttttctgtgaagaagggaagaatgaactcatgaagaagaagaagaggaccactgttgcaaattccatcccctaccacagttggcttatgaagtttcagcaaaagacatgtgatatggtatggtttctgacttctgagtgaacataagcaacaaatattcaaatcaatgggcctaaatgatcttgcagttttggattataaagttaagaattaaaaagaataggtgatatatgtatcataattttaagttttaaacaagtatgtcagacaaaattctacattctaattttatacatagatatgagataacctcataaccataaactacaccaaattttcatgaacaaaatatgattcacacgaacttttttctatcttgatcacctagctaacttgacaaattagttgttcgtctaaaactacacaaacattcaaagttcgttttaaattcaatatatttaaaaataacagttaaagttttattaaatggcattccaaatattgattccttctagaaaatttgtgtggttttaaattgtgaaatttggatctagaaaaaatagcaagtgtggtttcttgtgacctatggttgttagtgtagttgtataccattttttaaagttacattgtaatttgtaaaccatttttgtgtggttgacaaaaaaaaaacctatgacaaaattgctccgtttttattttcaataacaaattataatgtaaattaatatgtatcatagtgtttttaataaaaatatttaaaattaggattgattgttctgaaaaaaataacgcaactaatactttgttagcaaatactaacgtttacgtaccaaaaaagcattatgtaaatccattcatccatcattgtatacttgactttctacattattcttttgttgtatcaaatttaaaattaatgaatgaacttgacataataaaacacaaaatatatacttaaattgtacgatataaaagtttgatttacatattttatatctataaaaaagggtaaataaatgaaataaaacttttttttttttttttgtcaaagaaatgaaataaaactcaaattacatttttatgtcgtaatgcgagcacacaagtgagtgcatatccagtattaagttttttttttaataattcagaattgaaagcaaaggaaaaagaagaaatcgaaatcggaaactgtatattgttgttcttcgattcctcctcgctctacgccgcgtcctctctctcaaattcatcggaagcaaccttcttctcccatcatcgcctggttcgtttctaaaccctacttcttctatttcacagtatatcttcctttaattttcaatcgaatctagctttgtgtcgatctcaatgtagatcggaatcaagtaaaagaaatcgatgaattccaaaatgttcccgatctattgcaatgcacgaatcgtagaattatcacctacattagtcttgatctaatcgccctatttcaatttcaaattcgacatcgaagtttaaaggagatcgcaaaacctagttatagaatcgttgcgtttgagttgtttcgctggtgatgtagaaaccctaattttggttgtcctgtgtttggtacttgctcagaatccaatggcaacgataaggaacttgaagataaaaacatcaacatgtaaaaggattgtgaaagagcttcactcttatgagaaagaagttgagagagaagcggctaagactgctgatatgaaggacaaaggtgctgatccctacgaccttaaacaacaggtacagatttcattgtttatctctctgtattcgaagattcggagcccgtctttgttcgtcagaatctagaaatgctgtgttgtgctgtgtttagacttggtttttcctaatctgtgtatgtggtgatgcaggaaaatgtgttgggtgagtctaggatgatgattccggattgccacaaacgtctcgagtctgcattggctgacctcaagtccactttggtaaactacattttccattgttattgcttgctaagcgtcggtctagctttatgtattagtttataagaaacgctgagcggtgatttgaagtttaagagcagtagtacattatcaaactataacttttatatgtatctatagcgattggattaatcccctgcatgaaaccatcttagtctctctttgaggaaaaatgatgaataaggacacagaggaaactgtgaattcgtactctgtcttttgtctctaatgaaaactgaatttgcaggcggaattggaagagacggatgagaaggaaggtccagagatcgaagatgcaaagaagacagtcgcggatgtggagaagcagtttcccactgaagatgcctgatttagccagcgatgagtgttaaatctgtattctgagaatggttaatcatctgtaagaatctttatatctaaggttgcttgtcgactgtatacactaaaaatatctttctttaacattttggtgattgttctttcattcaatatctttgaaatggcacacttgctataatgtgttgtaagctgcaacttaacgattgataattgatataactttgacaaccatgattgtaaactaagtgaagattaagagcacggatttagaaaaggtgatcttattctaatttgttttgcgaagagattcaacaatttctgaaccatttatatgatgagaagacattcaagatttgttctacttttatgattgaaagcttttattttgatttctttacaattttagattttcttggagattaagaggagaagtagaaaaaaagggagaattattaagacgtcgtcgtttgtgagaaaaatagtcagagtttctcataatccagtatctctcaatctcatttgcctttcttcctacgactcttcctgctattaaatcccacctgacaatcaatattcaagcatataatgtgtttttgaattatagacgagcacaaaattctgaaaaaacatttatcaaaattcaggagtcaacatatataatgcagaaatgaaatttaaaatgtatatatataaagacaataatattcaagagccaatatattattcaatcctttcactgtttttaaaatcatcacactttaagaaaagaagaaattttagtttctgttaattatacattttatcagtttatcaacaacataaaactttttttgaaattatacaagtaaaatactcatgtcattgcttaaatattggcatgtcatttttctcgaaacacgttcgaaagtctaaactactctagaatcatgtttaccataacataacactttatcagctttgatttgttactctcgccatgtgaattttttttaaattataaaatactagtttttttttttttttttttaattttataaaatactagttgtttttaaaatatgttgaatcggacatgacagaagaagagaatttgttacctattaccgacaagtctgtacattcgagagatgagatcttcttcttgttcggtcatactgataaactcccattcgatgctactcacttctgcatttttgtttcgttttatccaaacaaaaattaaatgagaagataatttaacgctgacgagttaggaggatgagtgtagagtaatgaattgaagagagaccttcagagtcatatcgggatcgagtgaacttagtttgcctaagactgggaccgcgacgaagacgaagacggttggtattatccataactactggaaaatagaagaatattagataaatttacagagaaactgaaaatgtagagtttggagaatgcaagatatagaaaagatgtgagggaaaaaaatagttatataaaaagagagagagagagataggtgatttattttttattggaatttctacgtatatattcctaaatttataattcacatttttgtttttatatatcccgatcgaatacgtcaaaacataatttcgtgatacgttcgatttgttttttactattccaaaaagttcataatgctcacaataaattttgatcagattttgtttctgacctataacagaacattttaacagtcactaaaatggcgtgctagttttatttttttgcctagtaacgtattaaaatcgagtgaaaaacatcacatgcaaatacacttctcaataaatattatgaacacgtaatcctacaagttctaatttaaaatcacagtttttctttttatattttagaaatttttacggacggagatggctgtggaatgtggatgtacataatctataattttattttacagttctccaataacattaggtgaaattttttccccgaaattttcgacttcgtgaaaattggacaaaaaaagtccataaaccgttaatttcgtgttgtgatatagatttgtgggtcgtaaataatactagcaaaatccaacaaaacttttgttttcttgtgcttttttctctttagatttttttgtgtgtgtctaattttacatatgcatgccctacagataattcctatttatgcatctacagaactcaattatcgtctcagtgataataaatgcagtaactgtaagaaacggacgtatcaatttcttttcctgacagattgaaagttgtcttagagaaatcggtacttatataatgagcatatcattttctcagcgtgaaatcagaatgaaccatttatgattttacccactatatattaaagaagtaggttaggagaaaattgatcctacgtggtacgtattagctaagaccaattcaaaaatatgaaattcctctaatttatcattatgtgatcataatactggatatatataaatttatcgacaagcattcgttaacaaaaggaaagttatcgacaacattcagtataacaaattttcagtcatggactagaacgacttcattgaaacatgctttcggattgcagctgttgtctggtcacttcgactaaacttgtaaaagctgtcgagacaaaatcatacatttgaagtatcccatatggctatgtacgtatatatacaaattttaaaaccagatcagtaattaatgcatacgagctcagggctggtcctgagagtattgggcacatacgagcttctaagacggctgatatgacggacaaaggagttcacctgtaatgacccgctctcattataaagattttatgtcgtgatcattattaaggttttgaaagttattaatatatatacacaaatgatggttctcatgtgaagaatggttctaagtaagaaaggacaagaaattatatttgcctaaaagtgtttaaagatcaggaagctt

SEQ ID NO: 310 - DNA, 104861 bp, Arabidopsis thaliana
aagctttgcttctttcattgttgctagccaagtagccatgctggacactaccaaagtggtctgagccaagactttctaccttttgtttttcctagtctagacaaaaactttgcaaataaagtatattagtaggctgaaattttccttgttcatttatttcatcattctacacaaactaaaaaaaaataaaaaaaataaaaataaaataaaaaaattaggaggtttagtaaataaaacggacaatgaaaaaaaacacagaagagaatgatttatatatgttaatagtactaaggaactttggatccaacaggaaaacgtaaactgtggaacaccacgatcaagtactaaggggttaatcctttttgactcctcaagcgcaccatgaacactttgatggaaacaataagcaactcaagagattagaagatgggaaagttttatcactatatcaatgtatatttgttaccaactcacatagttaagcaatccgaagattgtgcgacggaagtgatgggccacacgaaggatcaatgaacactttgcatgagacgatggcacaatctcactgttcggaatatcagcatgatcatctaccatctttaaaatctaggatttgcttaagtgatttttttctttcttaacacttcgccaaatggatctatagatctaaggtttcttcttcttcctccaaggattatatgtgggttttagtacttctcaagttatctcgaatctggttagttttactaacttactattttactagcaaggaaaagtccaataatacgacttgtgtagccaaaaaaaaaaacacgacttgtgtaaatctggaaatgacgataataccctcgtaaaacctaaaactgtgaggagagaagaaggtgccctttttgtcccagcaagaataaatcacgtcggccttctttgcccttctcctttgtccagattttcttcttcaacctctttctctttgcttacccgccaaattccttatctttgaaattgcctcatccctttcgcgtttggtgattctgaagattccgcttcatatccttttgatctgtaagtttcgatttccgatctccttcgtttgtttcctgtcaaatttggttagaaattgttccgagcattgaattttctcgtacatgatctctgtttttaatctgtgtttgtttgatcaagttgtgaaatttcgaattgggttttggtggctcaagggtgttttgttcgttagctaaatccccaacagagagctttcaatttcagagatggtggtagttgtaaaacttaggctaaaacattaatctctgctcttaactagtgttggtttggatttttgttagaaacaatgattggagcataagtttttatagaagaatgcttccaagttagttgcttttgtgctatatcttgagggcttatggttatacaacttatagctcttttatttgttttttgttctcacttttctgtcaaggtcttatgttagtgttcatactttgttttcttctttacaggtctataaaagacactactggttgaattagaatctgtaagagatattagtgtttttgttggccaatattttgttactgtgatgaaatgacaaataacgagctgattatgtcgggaaaccacgatatctcgtttaggcaggagcaatatatggaagctcgacagaacaatgaactttttactagtcatgattacaattttgctttggaaccattacaagagaccaacctgcagataggtgtttcccgtgagcaaaatgaggtttggaaccacggccaggaacatgcattggctctacaaaactcagggactcacagtgaagaaatacatgaaaagcaacttgtggaaggaaaagatgaggttgattctcaggaaaaccaaaatgaaagctatgaccatacttttgacctctcctttcctgataatgatgactcgggaacttcagagaatgataaacttgctttattagtttctcaggatctcaatgataatttacagttggcggtgggtcattgcatgaatagggatcccttacctggcctgaacataagcctttctcagcagctagagttggctcctcctatccttcaatgccggtctctgcaaacagctcctgagcacaatttgatcgttggtatggaattttctgatgtccttgcgtgtaggagagcactcagagatgcagcaattgccttacgctttgagatgcagactgttaaatctgacaaaactcgcttcactgctaagtgcaatagtgagggttgcccttggagaattcactgtgccaagcttcctggtctaccaacctttacaataaggactattcatgggagtcacacatgtggtggtatttcacaccttggtcaccatcaagcttcagttcagtgggttgctgatgctgtgacagaaaggctgaaagtaaatcctcattgcaaacccaaggagatactggagcaaattcatcaagttcatggaattacactaacatacaagcaagcatggaggggaaaagaacgtataatggctgctgttcgcgggtcatatgaagaagattatcgccttcttcctcgatattgtgatcaaattaggagaacaaatcctgggagcgttgctgtggttcatggaagcccagttgatgggagcttccaacaattcttcatttcttttcaagcatcaatctgtggttttctaaatgcttgtcgacctcttattggattggacaggactgttttgaagagcaaatatgtagggacattgctgcttgccactgggtttgatggagaaggtgcagtgtttcctttggctttcgctattattagtgaagaaaatgatagtagctggcagtggttcctctcagaattgcgtcagctgcttgaagttaattccgaaaacatgccaaagctgacaattttatctagtagagatcaatccattgtcgatggagtagatactaattttccaacggcgtttcatggcttgtgtgtccattgtctcacagaaagcgtccgtactcagttcaacaactccattcttgtgaaccttgtttgggaagcagcaaaatgtctgaccgactttgaatttgaaggaaaaatgggagagatagcccagatatccccagaagctgcctcgtggattcgtaacatccagcacagtcaatgggccacatactgctttgaaggaacaaggtttggacatctgactgcaaatgtttccgagtcacttaatagttgggttcaagatgcgtcaggtcttcctataatccaaatgttggagagtattcgtcgccaactaatgactctgttcaatgaacgccgtgaaacaagcatgcaatggtctggtatgctagttccatctgctgagagacatgtccttgaggctatagaagaatgtcgtttgtacccagttcacaaagcaaacgaagcacaattcgaggtcatgaccagtgaaggaaaatggatagtggatattagatgccgtacgtgttactgccgtggatgggagttatacggtttgccttgtagccacgcagttgcagccctcctcgcttgtagacagaacgtatacaggttcacagagagttacttcactgtagcaaattaccggcgaacttacgcagaaaccatacatccagttccagacaaaactgagtggaaaacaacagaacctgccggagaaagtggtgaggatggtgaagagattgttatcagaccacctagggatttaagacaaccaccacggccaaagaagaggagaagtcaaggagaggaccgtggacgtcaaaagcgggttgttcgatgtagccggtgtaatcaggctggccatttcagaacaacttgcacagctcctatatgaaaaacatatgacatctctctttagattctttacttcttctctgatctgaatttattatttcttatacttaggtttagaatattattttcaaagcctttctctgtaactcatttttccaatagatatccaatgacagattcttcttatgttatagccttaacgaatagattttataaaaccattgccaaaacactattatatcatacattggggatgagagtttggttattaaaacaaaatggtgagtcaaatcacacaaaaagcaaactaagaaacttccggagtaataggactcaaagctattttagtacaacacacgtggagaaagcagatacattgtctcgtaacagaaaacaaactcaagaatggacccaatcttagagttctaacaatcttaatctcatgtctcttgatgatccccaaagcaaatccagatcaatgtgtgttccagagtttaacagcaacaacaacacgacgaccttcgcacagattttagtaatctcatccattggcttactcttagcccttgcactgcacttccgtctaaggaagctacgtcactccaagaacatccctcgtctcagatcgtctcaaaaacacaaaggccatgagaagcttgagagattctctcactatgttggtaaaatcaatctacatagcttccttgaaatcttcctgatcttagattatgatgcatattaaggaaatgttgtttgtgtcttttgtagtgcggcagatgggattcaaggacaggagagaatgtcctcatctctgcaaattagctaatgagtacataagaaaatcaggcagctgtgaggaagacatatacagcttcttctctgaagagcctggtgctgattctctcttcattaagctcgttgaagagtttgagagatgtattcttagttactttgcttaccactggagccatgcggatctcatgatcagtcaggttactaataaactttcattatcccttctttgttatattactaatagaccaaaaacatttcagatactcagtgccgatgtagagcctaagaagaagctaaagcacattgtcatggcggctacaaggtgagtctaaaaaacaagtgttctctttaatgattcttcccaaaatgattgtttgttccttggttaatatatagggaacagaggtttgagagggtgactaaaaatctaaaagtggcaagagtgtttaacacattggtagaggaaatgaaagcaatggggatcgcatctgttgatgactcagagtgtacagaagttatggctccagttgcacacaaggaccgaagcccggttctacttcttatgggaggtggtatgggtgcaggaaagagcactgtgcttaaagacattctcaaagagtaagtaaagtatcaacatatctgtcattaatcagtgttcttatgcattgaacctgtacatgcttgtgtgctttggatcagaccgttttgggcaggagctgatgctgtggtgattgaagccgatgcttttaaagaatctgatgtgatatacagagctttaagcgccagaggtcatgttgatatgatcaagactgctgaattcgtaaggttctttgtttccttataggttgcaataagaatccttaacgtaaaaagaacctgcagagcgacaaaatgtgcaaggaatcaacttcatatatactgcatattacctttgttatactcaatatccaatgttgtgaaactctgacggtgaaatggaaataaaacaggttcaccaatcatcaacagacgcagcatcatcgctgctcgttacagctctcaacgaagggcgagacgtgataatggatggaacactctcttgggtaccatttgtggttcagaccataacaatggcgaggaatgtgcatcgccatcgttacagaatgggagctggctacaaggttggtgagaatggagatgttatagagaactattgggaacgcataggcgaaaggcaacagcttcaagaagatggaagggagagaaagccatacaggatagagttagttggagttgtatgtgatgcatatttagcagtgattcgaggaattaggtgagaatgttccaagtgttggtctttaaaacaattgtgtgttttcataacataaggttttggtttactatatatgcaggagagctataatgtgtagaagagcagttagagtgaggtctcagctgagatctcacaagaggtttgcgaatgcgtttcttacctattgcaacttagttgacaatgctagactttactgcaccaatgctcttgaaggttctccaaaggttaaaattttcctcctgaaacgttttaagtaatgaaagtgaggatccatggtgaacaaatgtggtttatgcagctgatagggtggaaagagaaggaaaagacattgctagtggatccagaggagatagactgtttgaagaatgtagggaggttaaacgagaatgcagattctatttacgagctatacagaaatccaaatcctgcttgtgaagctggatcaatatggaaagacattgttctttctccttctaggttcaacattcaacaagagctcaaatactcaattcagaaagtggaaagattcaaacagtatctccaagaaacaccaagatgagagatgaagatagataaacgcagaagatctcttagctttttttttcccggtatgtcattcatttatgtaactcctaaaacatcaaacaaaattgaatctctctagtaaagagagaattggcaacacctaacctaagagatagttacattgtcaagcttggtcttaagagatgtttaaggaagcaaatgtatgacatgattcagaggaaaacatatgaatctcaccttaacattggtcaagcttgttcttaagagagaccagttccttcaaaaccacaactgaagaatccacaaagacaatgatacagtaagacagaactaaacatgtgaatgtcatttgcttgaaatggaaagcttctataacagtttctgaacaagtaaaagagtgaagaaaccatcacattatagctattgatcaaaaagcttaaaattcaaacaaaccaaaacttacaaagaagaaaaaaaaaagtttcaagaagaaaccaaagaaacaagtaaaaaactttggaaagcaagctccttcaaggatgattcaattatacaagactaccctatagaagctaaccaccaccatgtattcaatctccccccaaaacctatcctaaaccaatcttcttcacttcttagccttcctagtcgaagctctcttcgccggagacttcaccttcacactcttagccggagccttcttagtcacagccactttcttagcaggagcagcaacttttttccctggagatgttctagtcgaagtcctagaagctttagctggtctctccttagccttaggcttagcagcaacagctttagtcttggaaacagcagcaacagacttagacttaggtttagcagcagtaaccttagccttaggtttagcagtaaccttagccttagcaacaactttagccgcaggcttcttagttcctttagccgccgctttagctttagcaggagcaacagcagcagcaaccttacccttaggtttagctactacagttgccttcttcttaaccggagcagccggtttaggtgttgctgcggatctagcagaaggaatcttaaaagaagctttgactttaaccaatttctcagaagcaacaagtctcttgagattcacaagcaaaagcttcctaaaagtaggaggcagtgatttatgtttctcctctatgaatttctgaatcgcgtattgactagatccagttctctccttcaacgttacaatcgcatctttaatcatctgcatcgaattcaaacaaaattcaaattccaaatctatgaatctgataaaaattcaaaaaaaaaaagtttagatcgaatattgacctcttcataggtagggtgagaggaagttgttttcttcttcgttggagcagcagctttcacaggcttcttcgttgctttagccgtcgtcgtcttcttagatttaccacctttcgccgccggtttcttctccggagatttcaccgttgtatcggcagctcctgagtcaacagtcgttggaacgttttcttcctctatagacatcttcttctctctcagaaactgatctctctgtattgatcggaagaaaatgtaatgcgtcggagaattttgtgatgaggagaaggagaagaactatgggaatgatgtttatatagtcagatgtgtttatgagacagagtttgtaatctcttctctgattggttaaaatgatgagtactcggatcggtgtatcaactcaggtttgaatttcaaccgttggatttaaatctatcgacggtttataatttaggattacgaatgtaaggatgcggaggttaatggatgtggataggtgcttttgtgtattgtattggtgtgcttttagctttgattgattttatcataactttttgtttactttatggattttgattttgtttttttcattgtgtagataattctgtaaggttttgtttgagtgtttaatcgattgaaatggttttgtgtaggatgagaaaatggggattgaagcaaggttggtcaaaactatggtttgttttgatagtattacggtatttttggttttttggagaatgcttatggttttttttttaatggttatgttcgttgaaaactagactaatcaaggagtgtaacgaactatgatttgatgaaatcggatgagtttaaggtggaaaattgtgttgttgaatccgaccaaagatgaccatcttcttgtgtgtggtgccacacaacttgttgcatgtgtgatgtgtctctctttaagagagtcctaactaagataaccaaagagtaatgcgttggaaccattttacatatttgaaagtcattacatcttgaattgaatcacaaagtttaaatttgttttaaaatgtggaattagtgaagcatatgcgtataatgatgatgtatgcaagtatatgcatatagcttctaaaagcttaaatgtaactttattattatcaataatagtatatgatattcgttagcaaacataaatctttgctatgaatttcgattcaggtaacatgttgctatgcctattctttaacaaatcaacattgatgatagttaaaccgcgagaaatttctgaacaaacatcaatattgatttgagattataggtttattatatatcatagttataaaaaagtttatattcataaggaaattgtgaattaggcaagttttcctctactgaaatatacgtaaagtcaaaaaccaattcatattaatacaaaattttattctttcatcatccatatataactaatatattgaaacgagaccaaaacaaaacgaaaacgagtaattgacatgaaactaagtttgtcaccttaatactgtagttctccaacgaagcaacgttggtgagatcttgttataaacctataatcacaaaccaatattcatatcggtatgaaatattttcgcattttcaatgattttttcttagaaatattatataacatcttcgacacgaatatatgtgtgaatatatggcatatatgattgatgcaaataagagtttcaaagaaatgatttaattagaaaattttccttatagagatatatacagacagtaaaaaataactttctaaattaactcttcttatcacatatataactgaaaatgtaaccaaaatacaaactggatccaactcatatatacgtcaaatgttttccaattcaaaatctaacccaacacaaattaagaacgctaaattgatctatagctaaatgtcattacacaagtaaaaagaaaccgttttgtaaagttataatcaatctgaccatagtctaattattttcgtcacaaatattttctaaacgatgatactcttaaatgttaaaattcaatcaatatatttatacccaaaacaaagccgctaagtaagataggaacctttaacacaaccataaatagcttgagagtaaacgtgtatgtagacattaatccaccaatctctcgttcaaaattgatgcgtccaaatggtttactcttggatgtcactagtcatttacattttttacattcaccaatggaagctaatgttggtttttaaaatactcgaaccatattatctagagtcttctagactattctatcacttaacaaacatgcagtttgattacgagtttttctcgttacggatttagtgatgagctagtaaatgattattgattgacaaaacttataatatggttaatgttttccatctaccatttacgaaaaaggtaacaaatttttgtcactaatctttcgataaacacaagtatgcaattttatttttattttttgtattctctacatatgctaagaatcttaattaaaacaataagaccttacactagttttgattatttagaatacttatccacatcccttactttcagtacaaatgtcatcttcattcttccctagacattatttaagaaatatttacgaaattttacgaaatcaaattaataattgtcattgagacatttaaaagtttatcactaaactaattccctaattagggataaattttcatttcttatgacatacaaacagaaacgtgaaacacgtaggccctctttgttaacctcctcacattaataatttgtcgtaaacatcctcacattaacacttcgtgaatgtttagttctaaagagaagaaaaactttaaatatgtttagcatatatttagttaactttgttctatgaaatttaaagtaattctttttgtcttatgacatttaaaagtttatcactaaattataagctatttgatctaccttaattaatttttgaattacttgattttttttgtcacataattaattttatatttataaagagtatataaataacatatgatttggatactattggtggattattttgaggattttcaattgtacacctctagaaatacaaataaaataaaaatacattttggtcgtagattgtacaagcattgatttttcgatacaaattttgtcatcaatatcttcaagattttccgcggagcagtcccgagacatgcgtttaacatgtgagtgacacatcttaacatgcgtttcaagattctagctctggatcttcacactgaacagtttcgtgatgtcccaacaccgcccacaccccgggaaccgagcgagctagttaaccttgaagatcgtctagccttggttaaaacatattatggagtttctcattgggaagtaaggatatggagcttggatccacaggaagatacatggaccaagacgtactcattttgtttattccctagagctcttcacccttggatatggaggttgtggtgtagaccagtgacagtttctaagcaagggaatcttttcttccatgacagtgaaaagaggctgttcaaatataatccagaaacaaacgaagtccattttatcgctgcagacattcgtgttttatctcatttcgtagagaatatggttccacttcgacattcggattctgctccaaagattgtgacatacccttctacacatcatttgccgccggactcatggatgtccaaatgctttaaaagattcgagcggttcccaaacattttgcttaccacaactcttgtggcttttgtcatttttcgcttttcgtctaggtcttgattttactctgttgtgatacttttttttgtcaaaaaagagtctgcttcgtcagttttatgcaagagattcttaaaccgagtcataaaaaacaaagtataactcattactccacagccataggccaaatctcttgtataaaaaccaaaacaatctaactggaatcaagtttaacatatattgagaaacactttcaggttcaaagatcactgtagtacaagaacaaaaggtaaacaggataaacgtcaaaaacgtgtgtagtagaaacagtcaaaaggtcattcattgcagagcgcttcaacggaagtaaccgtagagctccaagtagcaaatgcaaaagttccacggagttgatgtatctgcagttggaccggtcagaaccagcctgaaaaacctaaaggggagtaatgcatttgctgcggtgattggccatgatgcaaactgaccggccttgcacattgtttggtcatcctcatggactctcaagtctgtccatgttttcccatccatcgatcccttcaaacccatcaagacaacgacaacacaaaactttcctaagcacctcttgtcttaagaagacaggaaataattgtagcaaaaataagatacctgaaacttccagaatcttgtgaatgctcttgatccgtcttgtctgaaggtgtaatagttgcacataagctgcaaccaaaaatcctcaccgtgttatattattttcagaacttaaagtaaatgttgttttactcaaatacattttctcttatttctgcgagtatgggttacatatggagcatttagaccgtttgtgtctttatgagaacagagtatgtagaaagagaagttatggaggagacctgatgttcttcgcctaagtccaccacccaccaggatgatatatggccgtcttccatcctaggccctgcaaaggaagtaccctggtgccaaaaaaatgaaatcatatggttaaatactgtatctaagaggaaagaaggttcacttcaattaattttatgcttcgtcaattttgtagttcaagccaaattctagtcatataatccgagcgaacttgggtggaccataccgcataggcttttgaagccaaagcctttggatcagtgaatctggatgtgggactactcgatgtaatgttgattttctgtaaaacataaagaactcaaataaggaaatatttttctccagcagaattccttgtcatggtaattggatttccaacaatatgaataaagaaagtaagataaaagtgaggttaacctttgcgagaacggggttgacccactgatgactaccataagatgtacccacaaagtgcagcaccccattgctgtccccatcacgtatgtactgaagctccttgaaactcgatctccgatgttggaatcttgaactagaggtgaaaagctttaataattgagaagtctggaaatataaacctggagatgtttacaatcctaagatacatgactatgtaattcatacatcggttcatttcctggggatatcaatccggatgttaggaagctagcagcctccttcaactgtacacaagacaaaataagtgagggcttggagagaaaatcagtcttgaaatgacaaattaaataatccccaaatcgatagaagatgttaagaacttacaagacgattgaatactgggatttctttgcttaggttgctgttttctaactgcgtcatcatcaaagcatagatggcatcagcgaaattaatttaacagaaaatgacaaagttcattcagcatatacagggtcaggatccacttacccttttaagtaactcatatggcaacaaagagaagcgtacatgaggtaacaggtcatcaagtgactgaagcctttctttgaacaaacttttggggtcagcatagttcatcatctcatctattactccccaactgtgcgactcctcagctttcatgcaccacatgagaacagcattcagaatcttttcttcagatgtcaccgtcagatctgcagactgcaattccaggatttaatacatgccataacgaaaggagacgtcattcatcactcttggtgatatccattacaattccattgttcatatatatttccacgataactaatcactggtcagtgcatgagcaacacgttgtagcagtttatttgggcaagtctccaagcgggttcagatgttcttataagaaatagtacgttagcgaaagagaaaacacacctcaagaatatcactgaaggtggtctgatctaacaagacaaagtccaaacttgcagtggtacaatagtcgaagtgcatggagaacttcctcttgcacatctcctcaatgagtttacatgatgagatagacgaaaccacttggagaactgagcatacagaatcctgcaacaaagttcagaggttagcttgagaaaagactcaagtttgtctgctcccacgcccaataaactcgcataaaagaattattcttgttgtatgaccttcttccaaaacggaacgccatccctgcatgtaatatatacatgacacaatattaatattctttttactctgtagtttgaatgtggtatttcgtttcttttctcttttagtttcagaaggcttgaaaccgcaacccacttcacggctcattaagctctctatcatacagaaaccatattgtaacagatgtactggaaaagaagtgaaacatgataatgacagcgagacgtatcatttactctagaggattgtgaaaagaaaaaaattacctctgagaggcactccaagagcattttgcagcattcttgatgaagtggaacaactccaaaccggtcagctagaaagagaagatgaatcaactcggtgccaaaattcacagtgtcttccatgttcaactctccactatacatgaaattcatcatagccttgaatgcttctggtgatacatcggttaggtaaatcgttgatgaatggctttcactcatcccatttgtaaacatctggatgttcatagagaataaataagaaaattgagaatcaatatattcatgtacatcagaactgcgacactaaaagagattctcacctttgcaaatgcaacactccaaagacttagaatgactttgtgggattggaaagtgagactatggtcactgaggtagatttttatgtcactatattcgccggttgagtacaactttaccagcttcccaacatcaacagggaaagcacttgggaacataaagccagataacgggtgagaaataggacacaagagtttgacttttctgcaggagtcaaatgctgttttgctcaatttaaaatggtctatactttcttcacactgtctcaccaatgacatcacttcaaacttagaacttaaatcccgcaatggagcaagttctgattccaaaatctacatcaaaacaaaagtttgaaggaaattatgacgaagatatagaatctccatgtttactaataaataaataaaaaggttcctaacaaagcatttcaccaggcaaaagggacaattacgtcaagggaagaggatatgagaaattacctgagttcgtccagtatagatatattgaagaagagcatgaagaatcgggtacgacactccacgaagttgaatgacatccccatcagatgatctcaaaggaaaattacctgatgcttgtaatataaccttgtgagcagggacatccatttcctcttcaccaacaaggaagactgtgtcagataattgccaactctccaagaaattcccaagtccccattgttcataatcataaccagtcccttcctccacaaccttctcgtcaccagactcatctcctctaacttcacggcaatccacttgcttccacagcaagatatgattatgtgtcacaggaaacacactcacgtttctatatccaacatgtttatcccagctgctcagaccaacatactgaacattacaattgggcttggggtcttgccacttaaataccaggttctgaaacggataccgacctttaccaatgctaatcaacccatcatagatactaatccagtaactctgaaactccaaagaacaacgacaaagatcagaagcttcctcatcgaccacagattttccatctacctgaatcttcaacctacgattcctattgctaccaatgataacaatgtagtgaggactattatctttcttataatggtaatgttgagtccccacattctctctaaacaccaccgtgacatcattgtgagcaaacgcatcaaacgcaacacaacctcttcccgcttcccggaacttcagatcatcactccaagcacactcaaaaggtgccactgtcagaaacttgttctctttcgccgcaaccatctttcttcataaaatctcttgccttcacctacaatatttccaaacccacaagccatcaacatctatataaccaaagacaaagacactaaaaacataaaaagaaacaaaatttcactcattgagacattttcacaaacacatagaactcaaccagactcacttttgaaaaaccagatcatacgttttgagaagacaatgataacaaatgggtttttaaaaaggaacgttattttcaatgaatcagctagaaagcaatcaacttggcaaaaaaatctgaatccaactggcttcataccccaccatgaacttccgccgtcaaatttcaaccacaacgtggtaataaaacacgagcaaaacaatcagatgcagagtacatcaacttttaaatcgaataaagacaaaagatttgagaagctacaaaaggaaaaataaaaatgggtgatttgatcataaatcagatatttagatgtgtggataaaattttccgagcgtacctaatgaactgtgcgtgacacgtaatagtgagtcagatctaatcctttttggaaagaagagtcaaaaaaggaaatgagagacacgaatacgaagaagaagacatgatgagatattttttgtgtcaggagaaacgagttggtggattattgtcacctgtacattaatgggccaactaaatctgtataaggcccacattttattctgaaactgagaattaaactctttttttggaatgagaaatggataatatgtatgaaatattaaaaagtatttaaaagtttaattatcttcataaatgcatatgattattttttattttttattagacaagaaaaagaataatcctacacttcctatttattttacatatcatacttttaaaataaaaatacaagccaaaacacaagtgtacaaagcattttcgaaatggattttttgatattgtgtacacaattctgaattatttcaaaatttctttgatattctgcacacaattctttcaaaaataattcttgaatttgaatattctaacaacaaactgaagtacttttttttagctaaagtgtatgcaattttataaatagatgtccaatgggctatttccagaacattttggtttgataacaattttgggcatatgtatgtttttttcacataagtatagtagatagttggacaatgtgatttctgttacatatgtaagagacatccattttaaagttttgaaatgtgttttaattttattttgtaggtttcaacacccacttttaaataatctatactattaatgagaatgatcttttagatgagaatattatataaaatacatgataaatggagaagaaaagggaatgtaattagtgtaagtgttctttaaaaaagaatgagatgaatattcagattaaatttaccaaaaatgcgcttaaacgtgtcagattttctcattctttgttattattttacgcatacttctgattttcatcaaactacttaacattttcgggattaatgataggtttactaacttagtgaattcttatattagtacataagtgagcactttgtagacttgttgtctattcctaaaatggaatctcaaactcaattttgtcttaaaataagtttcattcattatgcttgatacatgaattcaatattctctaaactcagaacagaatccaatattctctaaactcagaacagaatccaatattctttatccctaatcatcttagatttaagctaccttgctaaatgattaagttacttagcaacaatctccaaattctaacagtaccaatcataaaagaaaaagccacttgagaagaaaaaaaagatacatagccagaaacaaaccattaaacttttaatcattaagaccaataaacttgagaaacagaaaaagagtcttgaccaatcctacatttaccccatatatagctcaaaatccaacaattgcagcaaactctcacaagcaaatccaccccaacaaaagcacttaccccgatccatatatcacaacattgcagcaaccccaaagccgatcatcgcgcacaaaagagaacaacatacatgagaaggtttatgctggaccgcaaagataaacgagagttaagttgttatagcttgagatggcaatttcgggtggttatgctctgcttcataagtaacaataagcattgccggatcttccaaacatctctcaacatgcttcctcgctggacaacctctcatgctactacatttgtaatatcctctgcacacaaaaatccaatacaacacttccttaaaaggactcatcttacttgtgtcatctcttagccatttttagactcttttttctcatcaaaactcaaaagccttaatgttaaaaggatggttctttgcatgtgacatcaatctttatcacttcttaacataacaaaatatgatcaagaagtgtatacctgggataaggagagcccttgatgggcttctgaccatattttcgccatgaataatcatcaggagggatatctgcaaccttgttacttatagccggtactctaatcgatctcctaacccgatgtttcctgtcaatttcccaatcagattaactacaccatcttagtaaagagaggctatgaaaacgaaacaaaaatatggaactgacctcttcttagcgcagtggcatcggctagagctcccgcattttaagcttccatgttcatctcctttcaaggggcatttcctcttagaatgtagtgaattctgatcagttgaactaggaaccccaaaatggaaggagttctttccctctatattagcaacactaccatctatgctaagtgaagaaacaaaggacctagtggatgacatagttggagtacaactagagttatcgaaactcaaacttatcccaccattgcatttcctaagcataagctcagcttgatgtttctgtagctgctgttgctgatgaagatggtgagcttgtaaccgttcatgaaactgttgctgttgctgctgctgctgctgctgctgctcctgctgttgttgttgttgttgttgttgttgttgttgttgtactggaaacaaagtaggataattcgaaggaggcattgtctgctgattaagctgaaggagaggagctttagcatttgagtttaaactaaaagagcgagtccctaaagtgagtgaatctgaaggttgtctcaagctcaattcctggaaaccagaccggagtaccggtgttttctgagaagatgatgatggaacttctgttgtcctttgttgacatggatcaagtaagagactttgagagacatgactctgaagtttcttagctcttctaaacctagcatgaccaacactactgcttaacaaactcccaactctcttgaacctaatcacagcttctctagtttcagatactaaattcttttcaaaaccaacatgatcttgttgctgtgatctatgtaaaagattaagaactctatgacaactctcaacagctgctctgtttgttccttctatctcctccatctaagaaccctaattttttcccccagaaaacaaaactttcactcagaatacaaaagagaacagaaaatgggagagacccagatagtcaagtttcaagcttacacaatcccatcttgaagaacagctctgagtctcttataagaagaagatcaaggttaaaaaaagagaaggaattgggagatatagagagagagggaatgaagaagagggaaaagtaagaggggttccttggatgcttgtagagctaaaaagagggtcagtgttaatgagttgtcaaacccaagattcctccaccatctttaaaggagaggttcgagaaaacgaaaggtgtgaaagagaagactttcttgcacacacacacagagtcactcttctcttctctctcttttaagttggcttcagcaatcactcaaccaaaacaaaacaaatattgaaagcatccttatgattttcttttttaccccaaaacaaacaacacactgtgaaacaacaaatcattttattataaataaaaaaagacaactttattttttggaaaagcaaagagaggaaaaaaaggagagagagagaacgaaaccggcgtctgtcacagattcagaggtgggtcctactcgaagactcgggtcgtaattattatttttgcagtttaggtttttcttcttttagtataataataaaacaaatttaattgttctctgacataaaaaagataactaatcaaacttagcatcatcatacttcggacattttgttgacctcttttatctttaagttttttttgttcatataataccgtattgttttcttttatgatataaaaatatacgaatgtttcattgttattcacgagtttaaaaaaaaagagagaaagttaatttccaagtttttgataagtaacttgacaaaacaaaaaaagtaaaagaaaaagtggtaccaaacttttttacgcagtttctaacggttacttagtacacttgaggtgtctttttattctacggatcaatgatgtgtttttaagcataagtgttgctaaatgcagaaatttatatactaacaaacattacatttccattactagatattggaaattttggtgttaaatgttttgagtattataagttttctctatctattaatctaacattttagcatccattagttatgaaatttcaatatattattgttgaagattttttttgttatgtataatgaattataacgttacaattaatagaaaatctatcgaaaattggctttttaacataaagtaacgcatgttatcattattaagcgacaaacgaatttatattttatattaggtatatgacaattggtaatggacgaatcatacgttacttttaaattagtaagaaagacatcgtcacgccaactagtcaagtgcgcttgttctagtaacgtatgtttagggaactagccacaccgaatctaattcacgtgtggtttttgtggtgaaagatcgaccaatggtttaaagtattgttggtggtttaaatctggctgaagtaaaaccatattaataccttactattgctttctcttgcggtttcaatatagcagtttttaaatagtccgctttctaaattaaagtaacgcacatcataatcattaggcgacaaaacaaaatatatattctaccattatatacaagacatttggttatggaagaatcgtacgttacttttgaaacgttaagaaaacatcgttacatcaactagtcaagtattcttgttcaaataacgtatattaggagaactatataactatgtcgaaactaattcacgtgtgctttttatgaaagatcgacaagtggataatttcttcatccaataaacaaacccaaaattctaacccggtaaaagtaaaaaccttattaataccttaatattgcttcctcttgcaatcataatgtaatacattgctaaatgtagaaaaatatctacaaacaaacaccacagcgattccaatactagatattggtgacttcttgagtatcataacttgtttcccatatatcaatttaacattttagcattcaaaattagttatgaagtttcaattattcttgctggagataaattttatttactaggcataaatcaatcacaacgtgatatgtgcatgcttagttaatagagtatctatcgaaaattcgctttttttaattaaagtaacgtatatcatcatcattattaagcgacaaacgaatttagacattttaccatcatttacaagataattggtgatagacgaatcatacgttactttatagatagtataaaataaaattacgccaactcgtctattgcgcttgttttagtaacatatgttagatgaattggccacgttgaatctaattcatgtgtgctttttgtagaaaatcgacaagtagataatttattcgtcacaatgacccaagattcaaacctaattgaaataaaaccctagtagtaccttattattgattcctcttgaaatctcaatacaacagtttctaattagcacatttgacgtgtctttccattcgacaaagttttggtaaaatatatgcggaatttaacaaaattataagactttgtctataagggaatttatgaaaaatttgtttctccaattaacatcatcatcattaatcgaaaaagatgcttacacacttaatcaatcatgtacaagaaaattggtgatgaacgagttatatgttattttcaagacagtaagagaaacattgttacgtcaagtagtcaagtacgtttgttctagtatcgtatgttgtgggggaattagccttgtcgaatctaattcacatattatttttgtggaaatttgactaatggatagtttatccgtccataaaacaatgacccaaaatccaaatttggttgaagtaaatctctataaataccacgtgaatttaactatgttttgtgtgcaaatttttttatttcccaacagtttagaaatatctagaaacaaatgcaaaaagacaaccaaatttcttcaaaattatgttttaaaaaaagaaataagaaaattcatctttaattttgcattttgtattaaaaattgttagaaaacttttttttttggtgaacaaaattgttagaaaacttttatacatctctctttaattcttgtattaaaggtacacttcacaagtttttttttggttatttttcttttgacttctcaataatggctaagtcattcgattcacaaggattccgtgtacttctccatttagtccaaacaaggaaacaaatatttatagaaatgacaacattatcctaatcatacattcaaatatccaaaaaggacacaatctcctttaaaaagccatttttgaatcttcttggataaacaaacaaagtgtctgtctcacaccaatgtttcaaattttaagattacaattaaataaatataaattgctaagtttctttctacacaagacattccactgctcctgcacttttctttcttctcggtctagaaaagattcaatgaatagctctttagttgttgcattcagggagcttccgagaataaactagcaccattacaaattcctttgcagatgaacctattgacgcagcgactctttgatgcttagaagttgtttccaaccataggtctactaagctgtgaagctgcaacgttgggatcactggttctcccatacatgttatctctacctgtttacaaaaaaaaaacatagagtagttaaggttcaacaccggtgggtcgaaaaagtcccagatcataagatatcacccggtacacaagtcggaaataaaagggagagttaactttagtttaaacatttatggggaccttacagtcatattgataagcacaagacttgaaccaatgtatagaactacggtctatgtgattccatattagaccgagtggatacctcatataaaacagaaaagtagccactgcataagataagattgcttacctcatcttcactcttgagatcaagcttcctcatgaggtacttttggataaaagaaactggaatatttccatccctaccatataatgagacaggggatcaactctggcacaatataattctcccaaacaagaaaatagacacctcccagtcaaggattaggtgtgatgggccaaaaaagaagaaggctttatcaagaaacgtataccacagaaaacaaacatgacatggaaactcgggtaaaacaactgcgaaatcgaattcaaagccatcaatgcaataataagtaatatttgatcacagacttcacagttgacatataaaaacttagtgacaagaaacagagcaaagcaaaaagaacaacttaccttattctcaagtagtttgctggaatctgaggcaatgatgcttctccttccctgaaaccagtaaagccgtgtcactaagagatagaaatgaaaagacacagaaaatattgaatatcagaagtactcagagtctcagatacagaacaggaatctcactgattacttgacgctacaagtgagaaccaaacatgaccgtttctcctctcctgttttaggcttgctgcacctggtaacagtggaattctagaatcaccaaaagtagatgaccttttgcgacgagtccgacgcgttcgtttaagtgtagcagtttctgatgttgtaggatcaccgttattgctgatctcttcctcgagtttacactttcttttatgatcctttgttttggttttactcccctgaacatcattgtgggatgcgtttccaagctcagattttgggtcctttgttccgtttgccacatccacaagaaaatttagaggtttccaaagatgtaatttggaatcccatggttcatcaacatccttgtttcttcgattagagagggactggttaggatttgcatatgaagactgcaaaaaaagaattaataaataaataaatgtatggggaactatataaagaccataatcagtcataacgttgtgtttggacttggtaaagagaaaaagtaaaacataaaggtaaagagagaactgcaatgatcaccttctttacctgtcttttattctgagtaaactttttaagtgtttcaggcgagcttgcgctctctacatgatcatctccaaattcttcttccttcttcactgttctcttagtgaatgaaccactacctcttacatcttttctcgtagcagcttttgttctttttcctgttgtaccagcttgtgctgaaaccctgggtgtgcttaccaccaaagacgagatagacctctccttcctctttgcaggtaatgagatggaggacacaacttcaggcgctctctcctttttacgttttagaggaaataatttggctctcaagtcttgcaaaatgtggtcaggcctaaaataaatacataagagtggttctttagaaaatgaataagttcgccaccaacaaagctcttactggtgaccaactagtaagagagagtgtagtactaaagagatttgtttcaggttctaacaaaaaattgttggtgtcagcgaaagtattaaactagccaacatattcaggtcataactgcttctgaatcgaaatgacttttcttgattaacttcacactatgccacaaaaattacggaagaaccttccatatgtggcacacctcagcataatcatgtacaacttttcagcattatgtaagaaaacttcgtttcatcaacagtaagagccaaaaggcttctaacagtctatacaaggaatcactgctaaaccaagaccgaggagaaaattgtgtaaggaataaagaagaagaagaacttaccttagtttctccagtggggtacccccgaggtcaatatcgcatactggacagctctctatctcatcctctgtgattttctcataaatgcatttcctacaaactgcataaaagtgatataagaacttgtttcatttcaatagatagtaactatcaagtaagaacaaaatcttttgtaataaaggcgaccaacttacataaaaacaaacaatttctcagatcaaaagtttaagtaaagaatgaatagcataatgtttgaggttcaatgcaagttggctcgctgccaagtttgaatttattagatgcaagttagattatcggactccttccaccaaatccattatagcaaggccgataattggtatggtctctactgcatcaagttatattagttgtcatggcagaagcttgtagacaagtggttaatgagcatcatactgtttggttttaaaatcaagaaaatccatagctaccaacctaaacaaaagagatggaatcacaaatttgatggggatactgcattcatccccagaaacaaaaccgtgaagcatttaacacctaattttggcactgcagtaactcaaaaagagattctgcagggcgttctgaaaattttattaaattgagataagcagttggtcagttgtacaacggaaccgaactgttaacatttacctttttaaaatcagatggaatgagtaaaataattacagagtaacaaggtatatttctccgtaaacggtaacaaagaattggttgtgtaaagcttggaatggtagattgatttagactccaaaaggaatataaactaaatttgaataaattacagagatcagcaaatacttcaacatgcagaaaactcactactaatctggattgtatgttaaaagaaataaattaagccattccaaacagaaaatgatctaaactgtcttaattgtataatatcatgtagaagaaagaggctgataaatgctacttaatccaaatattaacttacattaaaccgatgagagtagattaaagcacttgttactcgaacttcctaacacaaaacttacaagttggatataacaaagcaactgaatctaactaacaacatgattagccaaaaccaaatttggacgtcatgagtttgaccaaaccatctttgacgaagaagaagacactcacaaattttacctaaagagacgaataaaggaggattcttgcagtctaaatgtaaacaaagattacaaattctgctcaacaacaactattactttagttgagaaaaccaaacaaaactattcattgactcgagtttcatcaaatcgactgagacatagaggagatcataagtggcatacgagactaacaacaagaatcatgcagatattcaatccaaatcagcaagaggaagaaaaaaaaaacacaacagagaaccaatcaaagaagacgataaagacgagaaattgcgaaaattagaaaccgggtaaaatcgaatcgaaacgtaaatcgagaaggggaaagaggaactaacacgtgtgaagacactctgaaatggtagtggcgtcacggaggagtttgtcacagagaggacaagtcatgcatgccaccaccgtttctctcttcactttagccaccatgtctccttccattgctctcttaacgactcctttaaatccttgatgtctatctaaacgaggattgatcgatgaatcgcacgtactatccccaaaactgcatgtagaagaaaaacaacgacccaccaaaaaaaagaacccagatttacgttaaacaacaactctcgtgcgagatacctacattcaaatccaaatccgatggagactcaagaccgaatatatccgtaaagggtcgaagaaaatcagagtgaaagaagtctcaatcggaagaaatagagtgatgaagaagagtcgacgaggttgaagaagggagaatctggggataaaaatggagagagattcgaaggaatagggtgagtataaaacagaggaggagacgatctgaatcgaggaagaaggtgaaggtgaagaagaagaaggaaggggtctctctaataaagaggcaagaggggtcttcgtgttgaggagaaagaagagaagcgagcgataccgtaaagagtaaaagacgttcctttctttactctgtttttatttatttcccaattgtgtaaatgggcttttccgaggcgaaacaatggtttagggctgcaaagtccaccaccgatttaaccctctctccttttttactgatattgcgtgattttaatctttttatttttgtttattgacatcattaggaaaattacttggaaataaacaagatgaagaggtgagtcaattaattaataaaacttaagaaatgaagaattaaaaaatgaagaggaggaatcaattacacttgacagagagtatgcttctcaatgattgaatttttggttctaaatatatatgtacaaaagggaattacgagaaaatagcatcaaagtaaccggaaacaatcataaatattataactgttaataaaaattaaaaccctttaaataaataaaatttgaaaataaaatatttatatatatatatatattgtttattatttctttttaaaattaacgagtttaaagatgtctatatttaactcaataatttttcgttaatgaactctaataaataagtaaaatctatatgtccatatgttatctcaagtaaattttatctaatttataacttggatgtcaaattcataatggatattttgaaacatttttccgaaaagttgtaaaaatggcataagctgaaaaaatcgaatacatcttatcacttcgcgatcaattggaaggtcacatatctctcgcaagagccaacagtttttatgaaagatcgacaagtagataatttaatagtccataaaacttctaaaattcaaagctagctgaagtaaaagtgtaaaaccttattaatacctcaatattgcttccttttgcaattataatttaactgtttctaaatgtagaaaagcatgtactaacaaacactacactgattccaatactaaatattggtaaattgttaaatctttttgagtatatacttttcttatatatcaatctaacattttagtatccaaaattagtatgaaattttaatggttcttgctaataaattttatttgttaggcaaaaatgaatcacaacataatacatgtttagttaataggtatgtatcgagtttctactttatgaatcaaaataattcacatcatcactaagcgacaaaagaatttacatatttcgtcacagtatgcaagacgaatcgtacgttacttttaaaacagtagaaatacatttttatgccaactcgtcaagtacgtttgttatagtaacgtatgttagaagaactaaccgtttttattttattttaggaattatccgtattgaatctaatttatgcgttattcggtaaaaaaacgacaagtagataatttattcgtccataaaacaatgactattttttttttgtaaataacattcaacaccccataatagagagatcaatcaaatataaactcatccaggggttaaaaatttcaattcccaaattcgacctcaaacattccagttgttcctccaaactccaaagtacaaagctgtgaatttcccactcttgaaaatcattgacagtacattctatcaacgtgtcaaaacatctatggtggcttgggagaatttccactaagccaatcaaaagaagtcaaatcttagtaaactagtaattttgctagcacatgtacaccgcgccgcactatatctgtatctcaacattaatcctctccgtataaaaatcaaataaatacattgatttataaatattaaaaaatctgagttaagcgaaaaaaaataaaagagcagaagtctctaaacatgcacgaggaagctctgaatctccagatatgaaatcgtagaaacagactctcgcatttatcgaatcctattgcagaagaatctgaaaaccctaatctgctcatcgttttcttcaattgcttgttgaagaagcagagaatctccgagatctgtgttcttccctctgggaatgtgcttcttcttcttcgtggagaacgattaaagcgcaacggagataaaatatatgaagcgttctctgagaagttacgcacattgatgaatcaagttcgtcgttggcagaggattctgatcctctcgctgctattgttatctgttttagctccgattgttttcgtttcgaatcggctcaagagcatcacttccgtcggtgagcttcttctacttctgcggtttcttcaattcgctttctaattttggtctcagggatgttagattgatggatatggcgatagtatagtgaagagttgttacttgattgcagattgcgttgattagatttctggaattcgttactggatttacctttgtttgatttagtctcagcttttggattacgcttctgaaagctgttttgattttgtctattgattgttttctggcagatagaggagaattcattgaagaattatccgacattgtacgtatatcctgagcttagatccttctgttctaatcctcaccaggaactcttcagtattgctgtttgattgtgcaatgattctatatcgtagcgttgcgtattatcctattcattttctcgagaatgcacaactgagatgctgctacttttattctgcagacagataagaccgaggatgaacttagacttactgctattgaacaggttctgttcgtttaagcattccataaactttgtttaagcattcattttgttgaagtgtggttgctttgtaattcaggacgaagaaggcttgaaggagcctaaacgtattctgcaggatcgagattttaattctgtggttttgtcaaattcctctgataaaagtaatgatactgtgcagtctaatgagggagaccaaaaaaactttctctcagaagttgataagggtaatatatttcggatcttgtgttattttgttttgttgtcattatcggggaagctttcttatctttagataccatgtatttcaggaaataatcacaaaccaaaggaggaacaagcagtttcacagaaaaccacagtaagctcgaatgcggaggtacgtagtttaatccagttgatttgaagataaaaggaacttgattatggattagttagaagcaattgactatgagaattctagtatctttttgtcaaatcacaggacactttcttcaatgggatttgctaacacttgttaatagaaaatcgaatttagaatttgcatccagatagtcatagcatatgctttaattttgtaatgtatgttccatttcctgtctcaggtgaaaatttcagcaagagatattcaacttaatcataaaacggaattccgacccccttcaagtaagagtgaaaagaatacaagggttcaacttgaaagagcaacagatgagagggtaaaggagatcagagacaaaattatccaagcgaaagcctatctgaatttggccctacctgggaataactcccaaatcgtaaaggagttgagagttcgaacgaaagagctggaacgggctactggtgatactaccaaggataaatatttgccaaagaggtgagcacagctgattgattcaaagggagtcctgttccatcctgtaaaaagttttggcctttacttatgaagctaaatcttaatgaatattgtgttaatttagaagagtcatacataaatgttttgtttcttttcagctctcctaacagattgaaggccatggaagttgcgttatacaaggtcagccgtgcctttcacaactgccctgccattgctaccaaactccaagccatgacttataaaaccgaagaacaagctcgggcgcagaagaaacaagcagcatatttaatgcagcttgcagcaaggactaccccaaaagggcttcattgtctctcaatgcggttgacaacagaatattttaccctggatcacgaaaaaaggcagcttttgcaacaaagttataatgatcctgatctctaccattacgtagtcttctctgacaatgttttggcctcttcggttgttgttaactctacaatctcctcatcaaaggtaaatgtttcacctttattctctttctttcaacatgttgtggttcagttcctttatactcctgaatttgatatctggacaaatgctttaggcttctactgtggttagtaccatatataggatattgtctagttatgaaactaggaaaaggaagttacattttgtgtgctctttgttcagtgaataactttatctttttttaaattacagttgagaaaccttgcattgttttatgttttcatgattcaaaacttatgccccatattgcaagcatcttacacttgttaattcaaaactcaggtatcattttaaatcatgttgcaagcatcttaaacttgttaatgcaagattcccgatccaaacttgtgtttttaatgctcttttccgaatctctgctgaagccacatgtcttttaacaaatgatattactgcttgcaggaaccggataaaatagtattccatgtggtgacagattcactcaattacccagcaatctcaatgtggtttttactaaacccaagtggcagagcttcaatccaaatcctaaacattgatgaaatgaatgtcctgccattgtaccatgctgaattgctgatgaagcaaaattcaagtgacccaagaatcatttcagcgctcaaccatgcacgcttctatctcccagatatcttcccaggtctaaacaagatcgtactcttcgatcatgatgtagtagtgcaaagggatctaactagactgtggagccttgatatgacggggaaagttgttggagctgtagagacttgtcttgaaggtgatccttcatatcgttcgatggactcattcattaatttctcagatgcatgggtttctcagaaatttgatcccaaggcttgcacttgggcattcgggatgaatctatttgatctcgaagaatggagaagacaggagttgacttctgtatacctgaaatacttcgacctggtacaacattttatcaccttttagttctctgcatcaaaaattcacactgttaccttgatgagttttgaattcaaaatggttaatgtggcttatgtccgtcaatagaacatcttacatatgtgtatgttgtgaaattgttgttttggttgcagggagtaaaaggacatctgtggaaagcagggggattgccagtaggttggttgacttttttcgggcaaacgtttccgttggaaaagagatggaacgtgggtgggttaggtcacgaatcaggactcagggcaagcgacatcgaacaagcagcggttatacactacgacgggatcatgaaaccatggctggacatcggtatagacaagtacaagcgctactggaacatacatgtaccttaccatcaccctcacttacaacggtgcaacattcacgattgattttttgaaacaagttaccacaaaacttagattcaattcgattcttttcttctttccaaaatgttataattagcttcattctttaaacgatttcttgtgtaaatctttgttctttttgacacaacacacaaaattctcagagcagaatatcagatatagttcacagcaacataggtgttgttcgttctttgggttgttatatattgcaatctggatgcagtttattatgatgtatcagtagagaagagagaaaaagattgtgttggagggaaagagatgaaatatgacacgtggagggcgtcgattggtggagtatggatagaagcatatccaagttagatggcttgtgttggttcgaacagattttttatccaccacatatttatgtttgatccaaaagccaacacaagcaaagaaattaaaagtgttcttgttgctgtagaacacaaacagaacaaacaaaaaatcaattgaagagtctctcagtcgttaggggaagcaaatagagaaatggctagctttactgcctccgcttccaccgtctccgccgctcgtccggctctccttctcaagcctaccgtcgccatctctgctcctgttcttggtaaaaaagccttccttgatctttctcagatctcatcttttagtagaaattcattctggttatgtgcaaagtgaagaagatctttgtttgcttatatttgttgagtggttttgaaaacatgtatagagataagtctagtttggtggtgaatcaacaagaagtcaagaaacaattttgatctaaaggtttgattgtagtcagaaccaaacattaataatagaagtattgtgtaaatgagagtgtgattttagaccaaactttagtttagtggagaatcaacaataaacaaatgttgattgtaaccagtttaactattgtttgctcaggtttgcctccaatgggtaagaagaagggaggagtgagatgttcaatggagacaaagcaaggaaacgtctcagtcatgggggctggagtttcagctgcagcaacagctgctttgacggcggtgatgagcaatcccgcgatggctttggttgatgagaggatgtcaacagaaggaacaggattaccctttggtctaagcaacaacctcttgggttggattctgtttggagtctttggtttgatctggactttcttcttcgtctacacttcatctctcgaggaggatgaagaatctggtctttcactctgaaggaagaatcaatctttcgtcttctcatttccattttcatgtgagaacatgaatcaaaagtgttcacccttctagtttcttgtaattgttaagtaaagactaaaaactattttcatgtgtgtttactttcccccattctctttatcttgtcataacattgataaggaggagattatgtgattattaaatatcatgcatgacatgttcatcaaaaccaaacaattgaaatggatgtattcaaaagcccatccataatggtcagtgagaaccaaattgataaattaatcttacatttacatttcaatcactgattattacacaagttttagagtctcttgatgaatacacatatagttaacatggggtaagacaataaagcaaattatcatttattcattcattacataatatatttggtagtaaaccatcttcactccattctccatagatgatcaataaagaccaaactcactttttaccatggagattatcaaagtaacctttagtatcactctcaaacttatctcttgaaatggtagaagatccgttgctccccggcgctaccatgtagccacctcctccactaccgccaccactcttccctcctttccctcctcctcctcctccacaaccaccaccatttttccctcctccaccaccaccaccacttttccctccaccacaaccacttttccctcctgctccaccgccgcttattcctcctcctccaccaccacctttccctcctccaccgctaccaccttttccttccattctttgaaatcttagaagttcttagtgactctttaagaaaacttaagttttgtttaaaagtgagaggtgagaggacggatatttataatagagtaaattttcaagtagatggttgatgaggtcaataaggtcgaagaggcgggaagacctgctcgtttcacgaattagtcatattattttatgcaatttcgtttatttaattgttgttgaatgttagggaagctttatcaagttctgcagttgtttatttggagtggccagagttctttctaaccgaacaaaaaaaaacaattacagaaaaaactaacttagtcatgaaacttttttttgttatgtattgtttcctcctactatgtatttctatttaatgaaaactctttaacaaaataaacattgatgaggtcgaagtagcgggaagacatgttcgtttcaataaaccaaaccttaacctccaattagaattgactatgtctcaccgtggccaaaacattgactcatgtaatcatgtgtgaacacgaatcagtagtggtacgaatctagtttcttgtaatttgaaagtaaagattaatactatttaattccagtgtggtatcccaattatctttatcttgtcatgacaatgagatgatgtgattattaaatatcatgacatgttcatcaaaactaaacaaatgaaatggattaacttgagagcccaaaaatgccagtgagaaccaaattgctactaaataagtcgtaccaacttaatgttcaaatcactgaattgtacacttcttgcatgatatagacccatattggaactcttttatagtaccatatattcaaaagagagtaagacgaggtatagcaaaatctcattttatttattcattagatactagatttggtaataataaccatctccatggcatagctattcattacagatcaaattcacttcacttgttaccctgtccactaccatgcaaattatcaaagtaacctttaggatcactctcaaagttatctcttgaaatgtaagaagatctattgctccctggtgctaccatgtagccacctccgcccccaccaccaccgcttttccctcctccaccgcaaccacctttcgctcctccaccgccgccgccgcctcttcctcctccactgccaccaccaccaccaccttttcctcctccaccgctaccgctaccgccttttcctcccattctttgaaatagtagttcttagtttcactctttagaaatttttaagattttgtgtgaatgagaaacgaaagtgaaaaggatggggtatatataataggtgaaaatttcaaatgcaagatcaaaaccaatctttcccaatgaaaatacttaatttagtcgttgcatttgattaacccaagtaaccaacccaatcgcctcgtaaacgtaataagttttattaatagggaacgtacgttgaccaaagcatgcaagtgagatgattgtgacattttattttcaaaagatggatgcgtcatttacaaattagggaaaatgtgtatattatatatatgtgcgtgtgattaacaaggatgatcaagacggagctgagagagatggtggtggatatcaggagaatgatgatcctcaaaacggagacgctcggcttgaatccaacgaccttcactgttccgaaccattcctttattcgcgtcttgacgccaaaacggtggaatttgtaaatgctctttcaaaaagtccgacgctttgttcactagcgcatggtctctcccactcgacagcacaaatctctctccttttccatgatacctaaaaatttcaaaaaaatataaagcaacgtcaatagtgtttgattagttgcatcatatgactaaatcgacattaatttcacgtgttattcggttcaatcatatcgcaaaaacaaattagacgtgatctcactagtttgatcttcttgaatattttaatgtggtcgaagaaatcatttggacacctagtccaatctatttatcccacggcttcaaaattttgtcgttttccagttccacataaaaataacatatcaataagactttgatttgggtcatcttataccatccctgtcctgtttttttttttttctcccatcatcccaataaatatgtaattaagtatatactattccttttgtataaatggttgtatatactattgtttttggctaatcatatttttttttttccaactatgcaaaattttccaatgttataaatttttgtgatcttcaatcacggcaacaccaatttttttttatgaacatgaatatataaacaatgaaaagtaaaataaaaaggaaacgtacccgtcaagtaaatgaagcatagcttcaagattatgagcagtagaaacatcaacggaaggtttaagaaacggcgagttctgatgatccaacgccagctcctcccccacgtggctataacaccacggcaacccctccgctatcttcatcagcgcgtgaggtctactctcgttcaaaaacaatcccggcgacttgggaaccacgtcgtgaacattcactactctcatcactttcactcccaattcctccatcctctccctaaacctaacgttcccaactctcggtcctccgtatgtcaacaccgtcaccggaatcactttccctttcttactccgattcaatctcatctccgctatatcgtacgcgcttaatatcgctaacgcgccgccgagactgtgtcccgtcacggtgatgcttaaatcggaatcatcgtcgtcgccgtgttcttccactaaccgtttcacctccgttaaaatctgttcacgcgctgagaatctcgcgaatttgcaggttgtgtctttgtcagtgtagagatctaagaatccggattcgactttaacggccgggtcggggcatcggatcttgttttcggttaccggttttaaataatcctttagatccgcgatccattcaagtttcgtaacggttcctctccacgcaatcgcgatatcacggcggccgagtcggttacgagacgtttcgtcgtctgaaacggcgacgtatcccatccaattagcgtttttgctccagactttagaccaccgcgatttcgagaagaagttcgggagattgatgttcgacgtcgcgtagaggtaacgcgccacctcgtaaccggaatcgatcattccgagagaatcgaagaactcgagtcgcgtgaacctggaggtgccgcagtatttggaagcgggatcgaaatcgaaagcgtcgtaacaagcttgagccatttcgccgtaacggattagctccgatctaagaattggatccattggatccattaacccggcccaatcgtcttctccttggatcttacgccacgtgtctcttagtcttctttcttcttcggtttttttatctcgccggcgaatatcttccgccgtcatccatagttctccagctccttccgcttcctcgattaataaaccttgtctttcccgcctttctcgctcgaggcgagaaatcacggcggataaagacgactcgtcggttctggacaaagctctcgtagctactcggaatttggcgggaaaattgatttctgagaaattggtatttagggaagaagaaccggttatggagtttttgtggttgatggtaagaaggttgttgtgggaaggaatagccgccattgttgagaagcttcaaaagcttgatttcgtaattggttgacgaagaagcctttataacacataaaaatagcttaacgtgtacttcaagacacaaatggtaataaggtaataaataaattgtcatcgatttcatacacacttgatagtatttattttatttgataagttataaattatatttatttagttttgagtgtgtttggtagtgattgcacaatgcttaaaggcaataagcaggctctagggattgaggttaaggatctaatgatctatcacggtgataaaaaaaaagtagtagtatacactaatttaagattttgcttttcaacattaatgtacattttattttaaaattgtaagatctacaaaagtttataatgaaattgttttttgagttatgagtctagatctaaagcaaaaactaagtcgtcttttatgtttctgttttagttaagaggatttttgtttttcatattgagttaattagtaaaaatatcataacattgcttaattttcacttcaaataacaaagcgacgacttttacattgttatagtatattaagtttcagaaaactatttataagattaactcttatatcaccggtaagtgacaagagaattgaattactcaacttgccgtcaaaaggaaaaaagaatgactcaactcatataatataagagtatgctttggccttcgtgtggaaaagtcatggaccaatggcatcatggcaacacataacatcagttttcaagtaatattttcgtatactatattacaaatgtacaatatatatatcaaaagtctaatgtgaatttgctgtcaaagaatacgaactctaatgtgaatccatatctagatgcttcttaataattgaattataagattgttgaaatattaaagacgtttttaatggtctttataaatgacctaaaactgcatatgaataattgacccccgaccatatatttacaacaaaacgacagctcaatctcgtcacattatgtaatgagaatgaggtgtccttctctcgtcactagcttacttactttatgtttcatcattaaatatttggacatgtgatttaatgaattaattagttataaaatataatagagaaaaaaatagcgttggagaacattcaagtcaacttgtatttgtttggtggtttcatctgaaaatccaaaataactcaatttgtatttcatttatttaattgtgatatcttactaatttttgcaatctggtacagatcagaatgaatggatccatactgtttaaaatatatatatatagatgtttttagtaagaatgattgaatgttatatatatagaatcgagttcacgcttttgtggagattttctatggtgacatcctaactcacacgtattttatattcttttctgattcgaagaagttttctatgccattaaatatagttccaaaatcaacccatttgcttttgttagaaataatttttgcgttatgacttattaaacatatatgagatttctataagtcattggtatgtcacttagctaggaggttgcacgttcaattttcttctcagtttggtcatagtcgtcgagacaatgcatacccggcccatttctttagaccatatccgaaaatgaaccctctaaatattcaaattcttgtatattcttaaagctaaacaactcacttctgaaaactgcttaaaagattattagcttttgaaacataaatatataaatttatcggagagaaagagtaactatgaatctatgatcatgcatggcttataagggagtttgtagtagccattatcgccagcctgccattatcttttatggccacttcttcaaggtttcatcgtgtgagtgaccatataacctcacttagctactaaccctttttcaatcattaattataatccctagaaagctttttaccaaaccaaaacaaatatttctatatagggcaagtctccgatcttacgggaagcactttttggtggtaatggaagagggggttaacatagatattcagatggtcatatatataattaatataagaatcaagaagatcaattccaaatatatgctgagtttgtaactatgttaagtttcatggatttctaactctaatccttatctttcgaggtgatgattgtcttggtccaactcaaattgttctcattctatgaaggacaacatatcttacttggaccaaataagttccttaatctttaaacaaaatcaattggcgttagtaaattaattcatgtcctatacatattactctaggtctaagcttacttcaactgacatgggatctcataatcactggtttactttagtcaagtggtaaatgggaaagaatcttggcaaattgttgaaagggaagtggcacacaagagaaagtaagaaaccgataggagttattattccttcatgatcagaagtgagattgagagaatctcacaaagacaatcatatcttgttgtatagtgacatgtttcaagaatagggtttttaattgttgacacacacacgatccaatccatcaaacccagcctgatctctttttcgtggctgcgaaaaataccgtcaatcaagagaagaataagcatatctctctgcttattccccaccactttgggctatctcacacccacacccttcatctgagcatgattcttgaacaaaataatattcttcgagagaaaaagtaaaagcttggtccacataaattgtaagattctaatccgatcatgcataaaaaagttgcaaatacatatataaaacatgtgcggatgtaccatattctttagcatctgcaacaaagaaacatattgtcctgttcaactcaaaatgctcactttggtatctaggaggaaaaaagggtaggtgaattgtgattatgcaacttttgttggtccttccttactaatataatatgaattaaagaggaaaacaaaatattaacaaagtcactttaatgtacttggggaacctttagctagatctcctgtgatctctctttttttggtctctaacattcttttcttctttctttctttgcttataaatagcatatggttcaagaaactcaagtctcaggcaacactgagcttaatactgtagtacacacacacacacacacacacacacacacaaaaccctcttttcttcaaacaggaaccccaaaagcgaggtttaatctcaggcgttttcagttctaaatctctttcaatccacaagagaaggaagattttgtttcttcttctccaagaaacaatccctagattgatcgagacctccttcaagaaaccatggacaaagttgtgagaatgtcgtcagagaaaggagtggttattttcagcaagagctcgtgttgcatgtcctatgcggtccaagtacttttccaagaccttggggttcacccaacagtccatgagatcgataaagaccctgaatgtcgtgagatcgagaaagccctaatgaggttagggtgttccacgccggtcccagccatctttgtgggtgggaagctcattggttcgaccaatgaagtcatgtcgcttcacttaagcggctcgctggttccgctagttaagccgtttcaagccaatctatgttaaaaaggtgttctaattttctatactacaaaaatgtatttcaataagaaacacaaatcttatagcctatgcaacctttgtaatgtagctttatatatatattgtttgttctgtaatttcaggtaatatccaataataattgactaatttctactcaccagttcaacttttagctttcatggtactgtttcagggaaataatagaacattcttcttttatttaagttaattaagggtaataaataacattcactgctaattcttaagaccccaccccaaataaagagtacagagtatatatatttctacaaatacagagcaattacaggcaacgatttgtcttcttgtctgattcacaacaagaacagcagaaactgatagttgttgtggtgtttcatttgagctccaagaaacttggatttggattgtaagagttatctgatgaagaagacattgaagacacattaatgggatatacctccgttacttcttcagtcttctcatcaaagtagaccacatcttgcattgttagctggtgatattcgacgactcctctcagatagaggttttcgcgggtgtatatcgagttttcatgagccaaccgtgctttctcagctaacagtgtttccagttgaagtcgcacctatagatgagagaaaacacacaaccaaagatcagaaatgtacataaagaaatgttaacattaatggctttgtaaagagtaaaataccagatcatcgtcatctgtctgactgtcgccactacggttctccctcagaaccttattttcttcttccagctgtgcgcatcgttgcttcgcaaaagccagatcagactttaccatcttcagctcccgaagtaaaagctttgccttggcagccatggccattgcaacctgttgagattaattcaaaggaggctcagtatcaatactaaaaacgattattctataatcattcactgaagagataacagcagcggaaataagcagatataaatttgctgctgtgaaccaataaatgatacagagcagccaccttacgtcgcgagatgcctttagttgaatctccaaatcagcttgtatctcaggattctgctggttccttgtaagacttggcttttttttaatctttttacgggtttcttgaatgatgcctgcagtacgattctccacagctgtaataccctcctaagaataatcacagacaaacaacaatctcaacccaacaaactctcatttagtacagtgcagaagatgcaccgatacacacaagaatgcatatgcctctgtatacacaactaatgtgagaactcgcataacctaaagaaaaaaacaaaactaatatatgtctcctatagtgtgccatatacgggtgcataaagagtaagaaactaacctcaacaacagtaccaatggtgccaccaatgtaattcaacgatgaagtgatcgcatctaatcttctctgtaatgaaggattctcgcttttcctaccagtctgaccagcttcctgaaacatggaaatggatttctactccataagaacgcaaccccacaaaacaattggaagagcaaatgcaactataaaaacctagtctttaaccttagttcctgaagttgtcgcagaaggtatgctctgctccattctcttaggactttgaggcaactgattaggatcatcctcatccaaaaaagccttagctttactagctaaacttccccaaaagcctcgttttggttcattcaaactcttcatagaagtatactcataagccttattcacctcctattcaaacgattcaattgaggcaaaaacagagtaaacccatgaatcatttggaacatttcaattgaagcaaaaacagagtaaacccatgaatcattatgaacaattaagcgacaccagaaagagagaagaacaaaagatgaaaccttgggaggagtgggaacaggagcagaagaaggagacgagtaagcagaagaaagagaagagtctctatgcgcagaagatgctcgaattgccttggcagcgagagaggacgcagcagatgatgaagccgaagatggagacggagacgacgaagatgaataagacattctcgtcgtcggcgtcatcatcctttccttatctttctccgtctccatttcgagatcctcgaatctgaaatcctcgatttcgtcgactttgttcatcaacttctgacgctcatgctcaatcacagtctccaaatttggtgggtcgatttagggttttcccaaaagagaatccttttggaattgaatggatctctctctgtttcgcaaatgatgccaaattttcaattttggtgtcgtcaacgctagacaggtgctatctcaagattccggttattgattgaatccttggttttctacaaatgtgttaaaccgggtttctcctactatgagatttcattataccattcaaacatgacctcataaagatctacattctagtaggggatgtgggctatgtggtggtggaatattccggtttgcttgatagatttgggttttgttatgatctacattctcactagttagtaggggatgtgggctatggcctatggtggtggaagaatattcctgtttgattgataggtttggttttgatattttgtagacttggcggtttggttcggtttgtagaccagacggtttggtcatgttgtctggcatacaaattaatggtttagctgtcaaatacaaaaaacatgattttatccacaatgaatctagtaacaatctacaacaacaacaaaaagaatctagtactaaaattggggtcaaaatctattgttaaaacttaatcctcttatttgaaacttcatcttatcttaatcctcttattgctcttttagttgaaacaactctcccacttttggaatttataaataaattttgcaagcttcacatggagtatagtgtgataaccatataaagtcacatgcggctagacttgagagtcgacacatatgtttatgtgcaatgtattggttgggcttcttaattatgaaacaaatgggctttgcaataacaagttaagtttctcgatcaagctaagcaatatctcagctcgtgtgttgattgtttcttttcttggtcaattccatcaagctatatttcttctagtcacggtttcgtaccgttgcctctatccgaatccatgcaacctccccaaccatatataacagataagagatttgcacaaatgacagcgaaatgtgctaaactcgtctggcgtttcctaagaagacgacattattgtgtgaattggaagaagcgtgattagggaaacttgacgtggactttttgggctattgacaaataataaccaactttggcccaaactgttcgtattaatttgtggttcattttgttttctagttgcatcttttcttagcctttgtcccctcggtttagccgctgtgaggtcgggaccgttgttaattattgtaacaccgcataattacataataatataaactcgcaaaataaaaaaaaacctatgagcaactatatacatttatttgcaatatgagtttttagtaaaaaaaattacttatatatattaggtaaaaaattttgagttttttttgcattttactaaatgtatatcatggatatgatctgactagaattagctccaatgccttttttgaattcaggtgtgtagaaattgcatatccttaatcagaaaatagcattttggttctacttaccgaatcaaaccaaaataaaccacaatcctatatgtcaatcctctggatgtaattaaccattatgatcgaaattgttgattgaaactagacggcaatacagctcagggtatttgtacttttgttaatagattgatagcaccatcctcttatggtccaacctatttcctaacatgaatttttcatctgaataatttagacttgtattaagaccttgccttagcacctttttacaaaatttaattattattctctctgaattaatgaaatttatatgtatatcgcctactcatgatctagtggacatctactgtttagctaattcaatattttacattcggatattgtgttttgatgcaaaaccaattacaaaaaagaaatctagggtttggaagtttttgcattaagatttaaacaaaaagttaaacacctcacaaaatttatcacgatactaaaataattttcttatcaaatcacatgttactatgtcagccggagaaaaaagactcacatgacatattatcacatcgattcacagaaacttacatcaaaatagaaaaatcacgaaaactggtaagggtttttaactttttatgaagacccattttgtgaatcttcacattcaaactacaaatagtcttataaaactagtcgcaccggcagaaaattattagggcaactaggcaatgtaagagacgtgagatatctttaaagacgataggaacacgtgtataaacatgattggaagacaaaactgaaactggattctgatggatgatttgacgacgtagctaagccaaacaccacgaggttctaagatgaagcacgaccacatatttggggtgggccttatctatgacatgttcctacttccctaacttccatggtcctacttctctctaatcgtacatccacttttaatttcgtttcttatctgtcaattattcacatgcgttgcttttttttctatattcatagcattgtcttcctttaattcagaatttttaggcttttagcatgtgaaactttaattttgctatcatattctcattaaccaaaccaaaaagtaagattgtttttttctttttgaatgagccactctacaaattgttgccaacaaccaaatatatgaatgatgattggttctcactaatcattatactttataaaattttctaatcatcaccatatgcatgttatgaaatcaagaatttagatccgttctgtacttctggtctgtcacacactcacactttgtcccggcttctatgtccttgtacgatgagattgcttacacatagcagctttatgataagaaagattttcatgttcgtcatattactataatcattgttatcctgcatgttttttgtagtcttttaaccttgaatatcactgtaacatttactaaaataatagttgataatttgaatgtagttagccaaatatcaattagtaaacgttcacttttcttttaattttaattttaatgataaataaatacatttactaaataaaagcgtagtaaagcatgttacttacagagatatgtttattaatgttatctacaaatcaccaagatcgagatctctgttagtctattatcaaaaagttggtgaaacatatatcggtatatatgtggaaggtctaaattacataaaatagccgtcgatacaagtacatatccaaatagggaaaagttaaaaggaaatggtgaaaaggaaagtaaacgacgaagacaaacacaaggattagagtgagttaactaaaagagataataaacacatcagaaaacgacaaataaaaacttagaaaaataagatagaagaagccaatcacaaatattattacattagcaattgggtggattggggggacccatgctaaagaaatttcaatatatagacactctccaattatgcttccatctccttcaatagagaaccaaaaaaaatggcaacagaaggaaaaaaccccatcaacatgaactctatgtcttcaagtcttgcaagaaccggtcaatggtacgaatcagtctagtttcaccaatagagtctcccggcgcgaatcatcagaaattttaacatgtatatatgtaactttgtagggttttttctcaagatattccgaccgatgttgttgttgaagtcggagaagccaatttctctcttcataaggtaagcaacaactcttaattcttggttcacaacatttttcaatacaaaaaaggattatttatttttcatatactcatgaactaggcttgaatagagtaataataggatggcgagattagtacaaaccattagcttacatgtttttaattacacaaaattttaactataatttttcatgattgtatatatatagttcatgttagtggctaagagtaactacataaggaagctaataatggaatccaaagatagcgacgtgacaagaatcaatctctcggatatacccggaggtcctgagatatttgagaaagctgccaagttctgttacggtgttaacttcgagatcaccgttcagaacgtggcggctcttcattgcgcagccgagtttcttcagatgaccgataagtactgcgacaacaaccttgctggtcggacacaagacttcctttctcaagtagctctctctagcctctctggagctatcgttgtcctcaagtcttgcgagattctccttcctatttctcgtgatcttggtattgtccgccgttgtgtcgacgtcgtcggtgctaaggtattattttactcagaactcattctcacttctttgtaagtgttggatctccattttggctagtgtttatgtttttcttttctacctatgtagtagtaactgcaataacccaatctagtaagttagtacagttttaggtatgtttttcaataaatggcaagaatatctggtttagttattccataggtttcaaatacagtaatagtttgaaattgattttaaaatttcatctatcaattttcctaagaaaaatcagtttgagaccattgttcttcacttcttttgttctagtgtttattattaaaaacaaaaatctattttaatattaaagtttagatctatgattactgttgtcagactatgattgcgatttagattcgataggaatatttcatatttaattcggtttggtttccgaatcttaaattgagcaaatcatacttctaccctattccagttccgtgagactcaagtataatatctatgtaatgcaaaatgaattacgagtttaatattttaacatccatgaatttttgtaatgcttggttacagtatctgatacgttttttatatctatttcttttgatatttgaaaggcttgcaacgaggcaatgtttccatgtcgaacaccaccaaattggtggacagaggaactctgtatcttagacgtcgacttcttctccgatgtcgtatcttcaatgaagcagagaggtgtcaaaccttcttccttagcctctgcaatcatcacctacacagagaaatccttaagagatctcgtcagagaccattcaggcagaggagtcaaatattccgatcccggagataacgaatccgacgaaagatcccaacagagagatcttgttcaatctatcgtctctcttttaccttcagacaaagggctgttcccagtcaatttcctctgttctctcctccgttgcgcggtcttcttagacacttccttgacctgcaagaacgagctcgagaagcgaatctcagtcgttctagaacacgtctccgtcgacgatcttttgatcccgtctttcacctacgacggcgaacggttactagatctcgatagtgtcagaagaatcatctctgctttcgtggaaaaagagaaaaacgttggtgttttcaacggtggagacttcaacagaggagtctgctctgtttcactacaaagagtagctaaaacagttgattcttacttagcggagatcgctacttacggagacctaacaatctccaaattcaacgcgattgcgaatcttgtcccgaaatccgctagaaaatcagacgacgatctctacagagctatagacatcttcttgaaagctcatccgaatctagacgagatcgaaagggaaaaagtgtgtagctcaatggatcccttaaagctttcttacgacgcacgtcttcacgcttcacagaacaagagattaccagtaaacattgttcttcacgctctttactacgatcagttaaagctaagaagtggagtcgcagaacaagaagaaagagcagtagttgttctccctgaagctttaaagacacgtagccaactgcaagctgatactacgttagctaaagaaaacgaagcgttgagaagtgagctgatgaagatgaaaatgtatgtttcggatatgcagaagaataagaacggtgcaggagcttcttcttcgaattcgtcgtcgttggtgagtagtaagaagagcaaacatactttcttctcttctgtttccaagaaacttgggaagttaaatccgtttaaaaatgggtctaaggatacttcgcacatagatgaagatcttggaggtgttgacattactaagccaaggagacgaagattctcaatctcttaaaagaaaacgtttgatctaagtgcttttgtgtgttgtgtataactcttttagactagtgtgcttattgttcccttcttgatgcgtgatttttttttttgggtgtgtgtgtttattgtttaatgagcttggttaataaaatgaaaatcgaaaccagattgatttactaattttttgtattaattagcaatctcataaaagatgatctttagttggttaataaaccgttaattaaagaggataattagcggtagacgtactaagcccaatagtattttaatttaagcccattaaggcccaacattgaagttccttatgcccgcaaattctgtttctcttccggcgacgatcaaatcgaaacaagtgatacaccggcaacgacaactgttcgccgttgatttccaccgaatacctgactatctgcgctgcgacggcaagaaattgaaaattatggcttacggttagtcaaattttcaatttttatgttggggatattcatgagtaaagatagattcataaaggtctagtctttttgggatctgatagaattcaaagtgagaagtcgtttggtagactagtgtaggcaaattcggtgaatgtgatataagcttgttacaggaaaaatgggaacttgctatatttagaacatttgaaatttaggtttttgtatgacataggatccaacaatagattaacgaatgataactgttggaaagagccagccttgatctattgttaagagaattatgacccttgaacttatcttccaaccagcttccttgtgatttgagagagaaaccaaatctgattttcatgaaatccaaaacagagctccaatgtcggagctgcttcctcctcctcctcctcctcctcctcctcctcctcctcctaggagggattcaggatttggagatcctgcattggtattccctgagtttgctgccaaacaatgcggtctcgaaaaagttatagaggaagaaggagaaggggaagatagtagctatggcaaaggttcttttgatctgagttcaagattctcaagcccttccatttctcgaaacaggtttgatgatgttgaaaacccgaaaaaggcttcgtcttttaagcggcctccttctgcgtcgagactgtctggctttcgagaggaagaagaggccgatcggagtagaaaatcgggttcctttgtggatcatatcggtcaggaggacaagagaatatgcgcctctggatgtttcagaaaatgctgcgcttgcacctgcatgtttgtttctgttgtccttataatcgtcttgttggtaggattgtctgcaaactcttcaatcaaatctatactacctcaggtgcttgtcacaaacctcaagttctcgagattggatatcgccaaatcatcgacagatcttctgatgaatgcgaacttgaacacggtgcttcagctctctaataataatgacaagacggtgctatattacagtcctatgaaagctgatatatcttctgagaacataaacctcggaaagaagacactttctggattcaagcaggacccgggaaatgttacctccttgaagatcctcacaagactcagaaaatccaaagtgtatgatgttgatgctacattgctgacaaacaaagagaagacgcttgaagctttggttgatgtgttcttgagagggaaactgagtgttgattggttgggatttaaggttcatataccaattgttattgcgtgcgagagtgtgaagcagagtgatgtgataaatggtctcaaaccagcgtgcgatgttcgaatcttttccgaatgaaaacaatgagagctattgatacacaaagaccctctgatctttgttttgttctgttcctttttgttgttgctaatttactcgttgtagattgatgaatacatagaaagagagaagtgactcaactttgtttctctaaacttaacatcaagaatccacaagttatctaccttttttttttcttcacatcatcagtctatgttttcttcatcattgacttggcttgtaagtgatatagttacgtccataagtttgttaaaggttggtttgatctctttctctttctatacctagagagatggatcaaaactcgaatcacgatagagccacatgcaaaatcttgggcgttgaagatacgccattaatgctctcttccatatcataccacaattattgagtctttggaaaaaattgtaaaaaaaggaaagacttttgaggagattaaaataagcaggtgagtcataagtagctgtggagttaaagacgtgtagagaaagcgtgttcactttcttggccgcgtttccaattatcaagattcttgtgagaaactaacttcttgattagttttttttgttttgttttagagaccgtgaaaaaagatgattagactaatgaatcatcttcaacggaaagaggtaatataagggactagagaggccattatattgtcacaagcttcttgtcttcttgcatcatctgtgtaaagtaagcttttttctctctgcaatttttgtctcttcttctttctttctgcaacttaccattattttattagcttcattgatttctctgctgaataaaatgtggataaatgcttctaacttatctctagattttctagagatttgtgacaaatgtcaaatgggttgttgaatcttcacgtgtcctcttttctcctcttatctcatctaatttgtttctttagttttgttcaactcaagcacatccgagaaagtcatagtctttgaacatcaaattgccttttgtttgtcaaatgacttaagttcttgatctttttcttgtagggtttttttctctgcactccacggtcatggcttcgtctacggtatgaaaccttcgtgatcttcactatataagttcattagatccttgtgtttagtctcttggtcctaacatttagtcactttgtctgatgttctctcaggctcagagcaagaagcagtttaagaggtctatgactaagaaatcacattcatggtggtgggatagtcacaattgtcccaagaactcaaaatggcttgcagagaatctagaaagtatgttgcttcacttagtattgagatctccacttactcaaaaagaacaaaatctgatgttttctttcttgttcttgttttggtttctcagagatggatgatcgagtgaaccacatgttaaaactgattgaagaagacgcagactcttttgcaaagaaagctcagatgtattttcagaaacgtcccgagttaatccagcttgtcgaggaattctaccgcatgtatcgcgcattggctgagcgttatgatcaagctagtggtgaacttcagaagaaccatacatctgagatccagtcacagagctctcttgagatatcatctcctaccaaagagaagttgagtcgccgtcaatctagccataaagaagaggaagattcatcgtctttgacagattctggttctgattctgatcattcctctgccaatgatgaagacggtgacgaggcattgatccgtagaatggctgaacttgagcttgagcttcaagagacgaaacagaagctccttctccagcaggaaagtgttgatggtgacaacaatgttgatctccttcacaaaattactacatatgagggagagcttaaagaagctaatgagaagatgcgaatgcacgaagacgagattgctaatctgaagaatcagcttcagagcttcatgtcttttgacacagaggatcatcttggtgctgaacaaaagagtgttgatttggataaagaggacactaaagaagatgcagtagctacaaaagtgctagccttggaggaagagctgagtatcgcgaaagagaagcttcagcactttgagaaagagacttattctctgaaaaatgagctcgagatcggcaaagccgctgaggagaagctgaagagcttacaacatgagctcgagttggctcagagagacgctgatacctacataaacaagctcaacgcagagaagaaagaagtcttgaagttgcaggagagattggcaatggtgaaaactagtttacaggatagagataacgagataagggcattgaaaactgcggtttcagacgctgaacagaagatattccccgaaaaagcacagatcaagggagaaatgtcgaagatgcttgaagaacgaagccaacttggagagcaactgagagagctggaatcacatataaggctgatcaaggaagagaaagctgaaacagaggagaagcttagaggaggaactgagaaaatcagcggaatgagagacgagagcaatgtgctaagagaagagattgggaagagagaagagaagataaaggaaacggaaaagcatatggaggagcttcacatggagcaagtgaggctgagaagacggtcaagtgagcttacggaagaagtggaaaggacgagagtgtctgcatcggaaatggctgagcagaaaagagaagctataagacagctttgtatgtctcttgaccattacagagatgggtacgacagactttggagagttgttgcaggacataagagtaagagagtagtggtcttatcaacttgaagtgtaagaacaatgagtcaatgactacgtgcaggacattggacataccgtgtgttcttttggattgaaatgttgtttcgaagggctgttagttgatgttgaaaataggttgaagttgaataatgcatgttgatatagtaaatatcaatggtaatattttctcatttcccaaaactcaaatgatatcatttaactataaactaacgtaaactgttgacaatacacttatggttaaaaatttggagtcttgttttagtatacgtatcaccaccgcacggtttcaaaaccacataattgtaaatgttattggaaaatagaactcgcaatacgtattgtattttggtaaacatagctctaagcctctaatatataagctctcaacaattctggctaatggtcccaagtaagaaaagcccatgtattgtaaggtcatgatctcaaaaacgagggtgaggtggaatactaacatgaggagaaagtaaggtgacaaatttttggggcaatagtggtggatatggtggggaggtaggtagcatcatttctccaagtcgctgtctttcgtggtaatggtaggtgtgtctctctttatattatttattactactcattgtaaatttcttttttctacaatttgtttctgactccaaaatacgtcacaaatataatactaggcaaataattattttattataagtcaatagagtggttgttgtaaaattgattttttgatattgaaagagttcatggacggatgtgtatgcgccaaatggtaagcccttgtactgtgccgcgcgtatattttaaccaccactagttgtttctctttttcaaaaaacacaaaaaaaaaataatttgttttcttaacggcgtcaaatctgacggcgtctcaatacgttcaatttttttctttctttcacatggtttctcatagctttgcattgaccataggtaaagggataaggataatggttttttctcttgtttgttttatccttattattcaaaaaggataaaaaaacagtgatatttagatttctttgattaaaaaagtcattgaaattcatatttgattttttgctaaatgtcaacacagagacacaaacgtaatgcactgtcgccaatattcatggatcatgacaataaatatcactagaataattaaaaatcagtagaatgcaaacaaagcattttctaagtaaaacagtcttttatattcacgtaattggaatttcctttttttttttttgtcgtaattggaatttcctttatcaaacccaaagtccaaaacaatcggcaatgttttgcaaaatgttcaaaactattggcgggttggtctatccgaattgaagatcttttctccatatgatagaccaacgaaattcggcatacgtgtttttttttttgttttgaaaaccctttaaacaaccttaattcaaaatactaatgtaactttattgaacgtgcatctaaaaattttgaactttgcttttgagaaataatcaatgtaccaataaagaagatgtagtacatacattataattaaatacaaaaaaggaatcaccatatagtacatggtagacaatgaaaaactttaaaacatatacaatcaataatactctttgtgcataactttttttgtcgtctcgagtttatatttgagtacttatacaaactattagattacaaactgtgctcagatacattaagttaatcttatatacaagagcactcgagtgttgtccttaagttaatcttaagatatcttgaggtaaatagaaatagttgactcgtttttatcttcttctttttttaccatgagcaaaaaagatgaaataagttcaaaacgtgacgaatctatatgttactacttagtatgtgtcaatcattaaatcgggaaaacttcatcatttcaggagtattacaaaactcctaagagtgagaacgactacatagtacatattttgataaaagacttgaaaacttgctaaaacgaatttgcgaaaatataatcatacaagtgccagtgattttgatcgaattattcatagctttgtaggatgaacttaattaaataatatctcacaaaagtattgacagtaacctagtactatactatctatgttagaatatgattatgatataatttatcccctcacttattcatatgatttttgaagcaactactttcgtttttttaacattttcttttgttggttattgttaatgagcatatttagtcgtttcttaattccactgaaatagaaaatacaaagagaactttagttaatagatatgaacataatctcacatcctcctcctaccttcaccaaacacttttacatacactttgtggtctttctttacctaccaccatcaacaacaacaccaagccccactcacacacacgcaatcacgttaaatttaacgccgtttattatctcatcattcaccaactcccacgtacctaacgccgtttaccttttgccgttggtcctcatttctcaaaccaaccaaacctctccctcttataaaatcctctctcccttctttatttcttcctcagcagcttcttctgctttcaattactctcgccgacgattttctcaccggaaaaaaacaatatcattgcggatacacaaactataatggacctcctcttgctggagaagtctttaatcgccgtcttcgtggcggtgattctcgccacggtgatttcaaagctccgcggcaagaaattgaagctacctccaggtcctataccaattccgatcttcggaaactggcttcaagtcggagatgatctcaaccaccgtaatctcgtcgattacgctaagaaattcggcgatctcttcctcctccgtatgggtcagcgaaacctagtcgtcgtctcctcaccggatctaacaaaggaagtgctcctcactcaaggcgttgagtttggatccagaacgagaaacgtcgtgttcgacattttcaccgggaaaggtcaagatatggtgttcactgtttacggcgagcattggaggaagatgagaagaatcatgacggttcctttcttcaccaacaaagttgttcaacagaatcgtgaaggttgggagtttgaagcagctagtgttgttgaagatgttaagaagaatccagattctgctacgaaaggaatcgtgttgaggaaacgtttgcaattgatgatgtataacaatatgttccgtatcatgttcgatagaagatttgagagtgaggatgatcctcttttccttaggcttaaggctttgaatggtgagagaagtcgattagctcagagctttgagtataactatggagatttcattcctatccttagaccattcctcagaggctatttgaagatttgtcaagatgtgaaagatcgaagaatcgctcttttcaagaagtactttgttgatgagaggaagtgagttcatttttttgtttctatttttagttttatcttttgagtttgattttgggaaattgacattgatgattcattcttacaggcaaattgcgagttctaagcctacaggtagtgaaggattgaaatgtgccattgatcacatccttgaagctgagcagaagggagaaatcaacgaggacaatgttctttacatcgtcgagaacatcaatgtcgccggtaacttctatttcttacttgtaggatacgtaatcaatcctctagacgtctctgcttgcataaggaattggacattagtgttttaagtgaatcctagaaatccggaattgtaaccataacaggaaattaggctcatgtaggttggttttttggtctcccctgaagaggctggattgtatatggttttgtgaagctgatatcttgatttctgctgaaacagcgattgagacaacattgtggtctatcgagtggggaattgcagagctagtgaaccatcctgaaatccagagtaagctaaggaacgaactcgacacagttcttggaccgggtgtgcaagtcaccgagcctgatcttcacaaacttccataccttcaagctgtggttaaggagactcttcgtctgagaatggcgattcctctcctcgtgcctcacatgaacctccatgatgcgaagctcgctggctacgatatcccagcagaaagcaaaatccttgttaatgcttggtggctagcaaacaaccccaacagctggaagaagcctgaagagtttagaccagagaggttctttgaagaagaatcgcacgtggaagctaacggtaatgacttcaggtatgtgccatttggtgttggacgtcgaagctgtcccgggattatattggcattgcctattttggggatcaccattggtaggatggtccagaacttcgagcttcttcctcctccaggacagtctaaagtggatactagtgagaaaggtggacaattcagcttgcacatccttaaccactccataatcgttatgaaaccaaggaactgttaaactttctgcacaaaaaaaaggatgaagatgactttataaatgtttgtgaaatctgttgaaatattcccttgttttgcttttgtgagatgtttttgtgtaaaatgtctttaaatggttcgttctacgattgcaataataattagtggtgctcattgttttggatggatcaatgttatacttatatcatttgaaaatctcatgattgttggacttggaccatagttgttaatttgaaggtttctaggttctaacgttaataatcttgttcaaaccaaataaatctcattacacaatttggggaggtgttaaaagattaccaaaataggttaattacaaattcgactatttccagtaatatgggctaatataggctccaatttagatactaataatgggctttataaagcccatttatttttctccttaatatcatcactcgcagagattacgcagcgggaataaaaaaacaccaaatgcttacaagaaattttcgaaatttgaaagaccgttcgtttcgttgtctttgatttcccctgctgcaaatttgatcaaagatcatcggattcatcattcggtagcagcaattatcaagttctcgtaatcgtttctatgctccgagctccgttttggggacgcgattcagatactgtcgaagcttctcgaattttctaaatatatctctttctcctctctcgaatctgtatgttttttgagggatttcgtagaaattttacctagattcttctagatctgatcggaaatttaggattaggattcaaaattttcagtctcagtgactaattgatagtgaatcgcaacctagttatggaatcgttgggtcgaattgttcgtggtggcgtcgaaattttaatttcgaaatctttgtgcagtcgtacaatttgaaaactctaagaaccggaatttctacgaatgctgcaatggatgggaggatcgaggcggaaagtagccgctgtgagtgactttttccttttagtgatatttcaaattcagaggtccgttataaatggggtgaagctaaaacctcttggtgttgggataatagcttatttttcttataatttgttttcattttgacttgttattgttttctgggaaccttttggggtaatcagtcacacacgtcagtgaagaagaggtgtgtaagctccttcttgttctctttatgagatgtttgtcagcatatgcttcccattgtgcttacacttttaatttcatctttgttgcacctgaaggcaaaaacaatattttgagcagaggagacagcaacagcatcagttcacagttgggtctgagagctgtagtaatgatataaacaatagtaatcaacacttaagagaacaccaatctctggatattctcaatttgctgaatttgtcaaccgctactcctgaatgcaaaccttctggtccagaaaatggtaagtatatgcttgttatgacttccagcagtcataattggagtcagtttatgaaccatttatttgctttatcgctcagaaccatgacatgtaatttcactttgcatttttcttgtttgtgtcacttgttaacggaaaaaggaatgcaagatctggatgctgatttttacagccttaaggacaacatgtccggagtaggtaaggtcgtcaaactcattatctatgaatatggtcctcttctgctcatgttgtatgtgataatgcaggaagttcatttaaccatatagcagaacctacttcctctaagaggcaagccagttttctttgtttttgctttcatataatgccactgcacaagttttctttctcagcatgtatatcatcttggttatcttgctaacagaattgcacattttcatagaaattttgatgctttactttcttacaggactttgtttagtatccctgacaaccagacaaatgatttcaagaaagcaaacactgacaaccagacaaatgatttcaagaaaacaaacaccaccgcagatctgatggatggcactgagcggagtaagtaatcactataactttagtattgagacaatatctagaaactagaaaggtttactgtagtttgttttcattctggtttgacttcgcaatcactttttgttgcatgctcagttatcagaatgttagccatctgcaagtctcaaattttatgttgacatggacattatacatttttcagagttatctgtctttgatttggttggtgatgatcatacaacaaccaacctggaagaatgttctccgtctgaggctcacatggcattttcagtcgaaggtatagatcttagagatcacagagtagtggaaaatttcaactttccatgtgtacctagatcatgatcagtctttaagaggttatcctactgtgcctctctcgtgtgactcttactttctcctttcaggattaggtaaaataaacacggaaactccagttaattccccacaaccatcagacaggtgattagcattcacgagtatttttttttcttgggacttgtttgcattttgtttgttttcctttttatttatttatactgttttctcttacattagcagtaatatgtaccacttaagatatagatcagtgattttatttaacttgtgatgtgaaagaacttttgtgtaccggtgctcctctccatggaaggatactggtcaaccagatacatcacatgtcaggggaaggctcaacgactttgagaacgaagtggtaacaaagtctcgtcatcttatcttttagctgtcttccattcatttctaactcttttttcctgaccggatattttcatctccctcttacaggacacaatgattcaaagtagcaaaatgttccaagatgacagcctttataggtctccaattggcatacatgctaaagatgggggcagaaagcaaaaactgcaaactttcagtgatcacttgcacaaacaatatagcgactctagaaattacttctgtgacgttgcagatttcaacaacagcaggttctctgacgatgaatggaatggtaatgtcttatgcaaaaggtttattttcttttcattcacaaatcaccatctatgcaacccactaccttctgaaatttatggaaaacatgacttgatcaaagtagcatgtcacttcttagtgaatattacacaatttcatgtggtgtgatatgaactatagggaatcttttctgatataagatatgtgcacctgtttctttctttcctcacgagatcaagtaaaaagatgtatgaatttgatttcttgtccttccttaaccagctaagcccgcctttcttgatgacggggaagatagtttttactggaaggccgaacagccatgccaaaaggagagtttgaaccctgatttcctgaaatattgcaatgattgcactgagagtcgctcttctacagaacaccataggaaaaagaagaggtagtcttcaaactctcttatttcgtcactttatgatggtgatactgtgccttttgacattaaaagtcttctgcgttttagggattacctggaaacgacctggaggtccaacattagaggtgggtttatctcaactaaattaggaataacagctaacacgcatatatgcttttatcaaagaattttcatttgaccttgttagttgtattcataaaataattatagtctaagcgtatgtcttttggaggttcattgactcagtgtttcatatcattcttttggaagttctaaatcatatctcttaagttttagttcactttctttcagtatctcttagtttcctctgttgttggtgtttgaagttggagaaatatttgtgatttatctacatatttgttggaattactggggttttgcctatttatttgctaattccttggtttttctgtatttcagattcaccaactcgaagatcacatcttttaaaaaggaatatcgattatccaagtttcgcaaaggcagcgtaagtcaattccttaaaatgcatcaagccatttttgaactcatgctgattaaacttttcaaacataacatcttgttatttcagaacctccgactttgattttgacaatgtatttgaccgaccggtttggtcatccattgtacttgaggaagataaagacagccatagtttgcgtaggtaagcatctgcgatatttttctttctgattgtgtttcatatactttatatagaatgaactgcaatcctgacactagctcactgttcttaacagcgaagaatcttgctcgtctagtgcaggtattgatttttctgaagaattcttgagaatcatatgttaggattttgaaaacatttcattcttcctagttattgaaccgtcactgcccctaaatcttgtcagtttggaccaatgaaacccacaattcacagtttgagaccaacacaagacaaaggaaaagggaaactaataagtttagcaaccttggagacaaaaagtatatcaatactgaccttttccaagaatcgtgggaagactgggaagtggatgatcaacatatgaagagacaagttaggtctggaaagcagggcagactatcaaactcaggaaagttaaaatctaccagtcagagaaagggtggtctagacgcgtcttacgattggtttggagaaggatttacatcagcaggaataaactcaggtttgtttctcttatttatatttctaaaacatcttcaaaggcttgtctatcatcctgtcccaagccacggtgcagagatcttatatctagaaccatagaatatatttggatatggtttcagacctaaaacataatcattatcttggcgttctctctcacatgtaaactcctgttttaacttctgtcacagagattacaagtgagaggaataagccatatcctttcctaaaccctgagcgtggttcctctcactggcgttcatctcgtgcccctgattctattccggaaacatggattcccaagttttcagtaggaggcaccggagatgatgatgatggtgaccacgatgaagaggactatgtaaactgtttatcagcaaaccataaatctaaactagcaggagacacatgcggttttgagaatgacacgttatcagagaacgataatgagcaaagcagagaagtaaatcacccaaaaaatcagggagatgagacctcatcatccattgcaaagagcctctcagacgaaaatgagtatgtacggtgaacattgtcacacacttctttgtgttcttcactaacatctcttacaatatgttacactgacacataaaaatttcttaagtgttgttagatgtaaccccaacaaggaggtcatggaagctcgtcaccaaagaaacagaggtaaatttaattctgtttgctaagataatttgtttattacctagaattattacaaaaagctaacatatgaatcttgagacagaatcaggagaaaagacaagtagagacccgttccaacaaatgataatgctggaaagacgcacacttcagctcgtttgttttaacaaggcattgcttcttgactctttaaaaacttaggtaagaaattcatatccatatcttgggtctttagttcaagttatcaccaaatctgatatgtttcttaagcataaggaaaaaagtgttatttttggttatatctttcattgagcatgcaccactaggttacacagatataaacaccaaccatatctggttgtcgatatagcgtttgtacctaccttttacatgcaaccgtgtttgtcacttacccacgttctgtctttactatttgagacgttcttgttggtctatacttcatgaaggcaaatataatcacgtaaaacatgtttgtgaccaaatttaggtagacatggttttttgcatagtgagtttcattttttgttttttttcccttttaaagattccaaattcattcctgtaacattaacacatgccgttgattttcacaaaagcctatatggcttatatatgacatatttttactctgatactcgatatttgagttaataaagttcataatgcgtacttttcttttagaaatgtggtatactttattgtttttttatactttaattatatgaggggtaatgagatgccatgatattagtattgtaattatatattttatgaataagataaacaaaaaaatgtctattgcaagctgggaacgtgagccccaattacagctgtgtgtgtgtatcaggcattattgcagtttctatcagttgattctgtttcttacatgccgtcctacaaaatcctttgcatgttaattaattacttaaaaaatatcctaactatattatttatttctaagtatacataaatattagaaaataacatgattatgatgttgtgaccagagaaaaaaaaaatcttcaagatcacgagtttgaataccaatgacaaaacaataactctttaacatgttttggtcccgagtgtgaattaagaatattgcagcttatgtttttggttaaaagagaaaagaagaaaggtgaatcaagaatattgcggctgtttgtttctcatgtgcaacatgtgtggtacgagattgatgattcttgttacgttagccaacatcgcgtgatgacaactattctaagacgaggtttcacatggccgaaacattaaagcttcgcttaatcatatcaaactccagaatttagtatacttgatcattatttagtatgcaattatgcatgtagttcaaactaatcattggattggatgtattagtctagatttcaaacgtaatttttttccaaggttatgctgatttatatgtttgtgacttatccgaatgtttttaacaaccaatatacaaatattcgaaatttgagaatcatcatatcctattatcctcactaccagttaaaaaatgtcatttgtggaattatatggaaacacaataggtgaaaaaagaagaagttcattacgtgctttgaattttatagttgaatttctatttcagttttataatccagttgtacttgtatgatgcgaatctaatctagtggttcggactatccaagtcagtttcatgaattaaattatgggggaaaaataaaactatttattacaaggataagggcaaagtggccctaagttgattatatatctcttttgcatggtaaaagattatttccacatatgaaaatatgcaaaaatccaaaaaaggattatgtctatatattttgctgtcaacaagaaaattccataagtgtataatgaaatttaggataatacatagaataccactctttttaccagacggcgacattttacactgagttaaaacttataagttttttactcgttccaacagtagtcaattactcgataggtgttacaagcctagctatatataaggtcaaaaaagggagtgaaaaaacgtagtaacttaatagtagctcgttgataatatagaagattccacccaaaagagagcgattccaaaagatatggtgtcattttagttagatttaaatttgaactaattagatagaaaagattaaagatttaatgggaaatacgaagtgaatagagcatgcatgagtaaaagttagaacaaatagatgatatattcttgggtagtaacgtgttatttgacagaaaatcacatgcatatataaaatcgtgtgaacacttatactgtatgtttatcatgcgcatggactattggactccataaatagcaaggttatggttaaatgtagtaaaatggcaaaaaaaaaaacataatatattatatatatatatatatattcaattaactacaaatccttcaaaagtattaacaaaaaataaacaaatcctacaaaatatattgtgttgattttttgcatatttctttttgtcgatggtattttcttcagtgtaggaaaaaaaaattcaatttaagcaagaatgaatttttagtttatattccaccaattcttcccatttcgtttgcaagttctctataaatttggtatcttattttggaatatatattctaccataagactacatgtttgatatgaatcgtcaatttttacttatctatcggtctcaatccactctaagttttagggtattcggaactcaaatttggttagaatacatatacagagaatgacgacaggtagagtatatagcatatacatgtacgcgatcgcaaatttctattataatctttaattagataagtagaatttatgtactattattttcttttcttaggataatttttataacttttacaaacttaaattaaaatgatttcttagagtaattgacaataacaaaccaagaaagtcaaaagagaaaaagaagaacctcaaagtcttttgtgcatgtgtgtgttagtgtcatgcatgcactctatatatttatgatttgcaaaaagaaacatatatgtttctattgaataattctttcttttcttgatgaaataatcaatatttccttatataaataataccccaactgtagaaaggaaaatacctataaattagttgaatacatataaccaaatattaaaattacgtcaccatactattttttttccaaaatatatgattcctaccaaccctaaatttcatttctatatatattatataccaaaaaaacatatcttaacaaagtcaaaaaaaaaccaaagtctttcactttgtgtctgttctaaatctctgcgagttttcttacttttcgagttttgtgtgtgtcttcaagtgtcgtgcatgcattttatgcgtttcgttcacttgcatgctctctccctctttctctctctatctcacccataaaagttttaatttttcacatcgataaattaaattgaaacaaaaaaaaaaattcacccaaaaaaaaaaaacctcgttgccttcttcttcgccgttacagtcctctttctttcttcaattcgccgtcaaaatcttctctttctcttcccccgccggtccttcaccaatcctctgatctctctacacacgaacctttgattttgaccaacgtcgatgcatgttcatgactagtctcttcctcaatccttcaatttcatcaattcacgtcgatttcgtatccgattcgttgttctagctctttgtgtggtgttagggttttaagattttggaattggggtttggagtttgtgatgtttgaagtcaaaatggggtcaaagatgtgcatgaacgcttcatgtggtacgacttctactgttgaatggaagaaaggttggcctcttcgatctggtcttctcgctgatctctgttatcgttgcgggtatttctcaatctctctaatttcctattctaaactccaaatttcgtttgatttttgactaaagtctcgatcttttcgtgaccctcttcttgattctctgtttagctcttagtttgttcatgttctgtttttttgactacgtatatggtttcttagtgcgaatcttgactcttttaatctataaatagggaaaaaatatgtgactttggtacataaaaggaaaaaaattgagactttggttgtaatgattttgttatagatctgcgtatgagagttctctattctgtgaacaatttcataaggaccaatctggttggagggaatgctatttgtgtagcaaggtgcgttttttgaaactgtgtgaatatgtttgttttttctatatatagagtttagtggtgatgttttgttgttctgattgagattctgtgatgacagagactacattgtggatgcattgcttctaaggtaacgattgagttaatggactatggtggtgttggttgtagtacatgtgcttgctgccatcaactcaatttggtgagtttttactagactcggttcagcgtattcgagtatattatatgtaagttgttgttgtaaggattctgtcttcacgtttttcagaacacaaggggtgagaatccaggtgtttttagcagattgccaatgaaaacgttagctgataggcaacatgtaaatggcgaaagcggaggaagaaacgaaggcgatctcttttctcagccactagtcatgggcggagataaaagggaagagttcatgcctcaccgtgggtttggtaagctaatgagtccagaaagtacaaccaccgggcataggctggatgctgctggggaaatgcatgaatcatcacctttacagccatctttaaatatgggtttggctgtgaatccgtttagcccatcttttgcaaccgaggctgtcgagggaatgaaacacatcagtccttctcagtccaacatggtccattgctctgcttctaatatactgcaaaagccatcaagacctgctatttcaactcctcctgtggctagtaaatccgctcaggcgcggattggaaggcctcctgtcgaagggcgagggagaggccacttgcttccgcggtattggccaaaatatacggataaagaggttcagcagatctctggaaagtatcctttatttgcttctagtacttttgccaaatattttattctggacagacttctggtgactcattgtttatcttaacaaattctagtttgaatttgaacattgtacctctctttgagaaaactcttagtgccagtgatgctggtcgcattggtcgtctagttcttccaaaagcctgtgcagaggtaaatttcccattcctatggtgatgtcttttcttgtccttgaaatattttgtagagttatgactgatgtctgcattggtatataggcatattttcctccgattagtcaatccgaaggcattcctttgaaaatccaagatgtgaggggtagggagtggacgttccagttcagatattggcccaataacaatagtagaatgtatgttttagaaggtgtcactccatgcatacagtccatgatgctacaggctggtgatacaggtacttttaatatagttcatgtcttagctaaagcttcaagcatttgctggttttaacatcaaattttcatgaaccattttctaaaactattgttggttttctgtgtttttcacctctacagtaactttcagtcgggttgatcctggcggaaaactaatcatgggttccaggaaggcagctaatgctggagacatgcaggttggggtttctatgaactggtttctgtaggaatgtgctggtttttattttctgcttagctccattcttatccggttacaatatttataaatagggttgtgggctcaccaacggaacatcaactgaggacacatcatcgtctggtgtaacagaaaacccaccctccataaatggttcctcgtgtatttcactaataccgaaagagttgaatggtatgcctgagaatttgaacagtgagactaacgggggcaggataggtgatgatcctacacgagttaaagagaagaagagaactcgaaccattggtgcaaaaaataagagacttcttttgcatagtgaagaatctatggagctgagactcacttgggaagaagctcaggacttgcttcgtccctctcctagtgtaaagcctaccatcgttgtcattgaggagcaagaaattgaagaatatgacgtacgtggtagatcatgttgttttttacaaccatttgattaacccttaacttgatccttggttaagtcatagttcatgttaatgttatacacaggaacctcctgtctttggaaagaggactatagtcactacaaaaccttcagggttagttatttctttcacttctcaagtaaaaaaataaaatgaatggcaacgtatcttctcctatagtttacttccatacttgcaaatgatttactaacaaatttctttgtggtccagtgaacaggaacgatgggcaacttgcgacgactgctctaaatggagaaggttacctgtagatgctcttctttcctttaaatggacatgtatagacaatgtttgggatgtgagtaggtaagaactttcacaagtcttttctttaatctcatgatcgcttaaatcgaagatcatttagagtttttttttttctccctagtgtcctgtcactgtaattaataatatattcattgataggtgttcatgttctgcaccggaggagagtctgaaggaacttgagaatgttcttaaagtaggaagaggtatgaaatcttttatttcctggcctctcatggttctttctcattatctagactgcttccaagtagttgtgacttctgagcaatttatggtttggcgttcatataaaacattcaggatatgtatctgttatttgtgcatgttgcgccttccttatgttagaattttatcaaaatatggattgtttgcttggtatcctgcaaatttgtttctgaacgcagcttacttttcataatctcagcttattgagaatctcaagacactaactgtatgcatatatatatagagcacaagaagagaagaactggggaaagccaggcagcaaaaagtcagcaagaaccgtgtggtttggacgcactggcgagtgcagcagtcttaggagacacaataggcgagccagaggtagcgaccacgaccagacatccaaggcacagggctggatgctcttgcatcgtgtgcattcagccaccaagtgggaaaggtaggcacaagcctacatgtggctgcactgtgtgtagcaccgtgaagagaaggttcaagacgcttatgatgaggaggaagaagaagcagttggagcgcgatgtaacagcagcagaagataagaagaagaaggacatggaactggctgagtctgataagagtaaggaggagaaggaagtgaacacagcgagaatagacctgaacagtgatccatacaataaagaagatgttgaagctgttgcggtggagaaagaagagagtcgaaaaagagcaataggacagtgttcgggcgtggtggctcaagacgccagtgatgttttaggagttacagagttagaaggagagggtaagaatgttcgtgaagagccgagagtttcaagctgatatggaaggaaaaagggaaagggtaaaagccaaagtcatagccagttttattaatatgctgagaccaagagtaggagaagaagaagagaaagagagagagagagagagagagagaagtacagttttgtgtttgattctgtcatagttgtaggaaaaataagtttctggttctaaacagcgacaatgtcccatcttttgttttttgtttttgtttttgtatttttatggtatcgtgttgagtttggggtttatagtatgtctccattaatctaggttttgttgtagaaggcaaatggagctttgtgcttggtgatgaaacagttgagttgatttttttttttgtaattgttttcaaccaaatgcctagttggtttaatttttttaaaagttgtttcttataatattgttaaacacaaattatgacagttgttgaaaactgcatgaagtagacttgtaaatggtataaggagattaattaagaggttaaatcattttaccaaaaacaattacgataaaacctctacaaattaataatattagaaacgaaaaattctatatattcataaatatattaatttatcgataattttaataattattaatttatagtgaggtttactaattttgtaattaaaaaaataatatctaaaaaacaattttttctttacaatcaatatatttctaaaacagttacaagtagaaaaacaataataagtttagaataaaaaaacaacataaacttttttacatgtagtaagcatatttgaaatgaactctaccagaattaatattaacttaagaaaaacaaacaatattaagtcatactacactaaagtttttacatataatatatatatatatatgatgtcatatataaaatactattatatattataaatattaagttgtatatatagcaataagtttaacaattgttaatttatgatatgatgagataatatgtttacatagaattttcaaaaatgacttcttaaaattattttattgatttatatcatttatgtcataaaaaattattaatatataaaaaataataattcatcgattattaattgattgaagttttacgtttattgaactaattttgtacatggtacttcgctcttggtcctcatccattaccgataggatagagatatgttactacatgatttaatggctaaacaaagatactttcggtttcttcggaaaaatctaatttcaaaagaaccgtctacttttactttaggtaagtatgtattcttgaaaaaaatttgatttcgtatcaaagttaaaggaacctagatttcgacattaggtaagtgtgcattactttgtttttgctttataactttgcatcatcaatttttcaatttgataaactaattttgtttttcaggtgtcgatttcatccgaatgaataagattataattaatgtggccacctttaatatatgatttaacttcttcaataatctctttatacaaattatgagcttagattgaactacgaggcacttaaattgaactaattatgtgtttgaaaaaaacttaaataccacatgcaaaaagtttagttttattttaaacttttaagcaattatgagctacttctcaactgtccatttaaaatgacatgttatatgttctttttttgttgctcatagttatgttataattgtttttttattattattatgagattgtattaaaagctcaaagagctaatgctatagtttttttttttctttttttgtcatcattttaaaacgagaagtgtagccaatgctatagttaaatattatatttaatactacacaaaaaatcaaggttattcaattcaaaagaaaaccacaatggacaatatatgccacatttgcacctgagaaatgaaatacatccatgttttcaaatttacatttagccccgttataatattaattacatataggacccaattttgacgtatggtgaatctcttggaatttacaaaaataggcttcttcttccaaattcacagattctcttctcctccattagaacttgtctgattctctcaaggtctctctctccattttctctccttttcttctcctgaatctccgttaaactattttttatcttcatcgatagatctagggtttattgcttcaggattcttcgactttacactatccttgttctgcttgtaatttgacgtgttgttattatcttccattggtgcagttcagcttctcctgctttgaattctctcgcattttcgtaaatgaggttccttttttcttctccgcgttgctcttacagttacttttggttttgattggctaagcatgtgatgtgagtttgattcctccatactgtaattgttggttttattagatcatcgtagatcgtgatagaagaagcgagcaaatatgagcgatgcccagaagttccagcttggaacaatcggcgctttgagtttatccgttgtgtcctctgtttcgatcgtgatctgtaacaaggcccttattagcacccttggtttcacatttggtaagattatgtgtctactaattctggtttgattccacaggaaactattcgaggtatctagtggctttgaatcatactttttgtttgtgtgtcccagaaataaggaaactttttgcttctttattgattgaatctctactttagttcttctttaccatgggtgaactccattcatgataacagtttatgcatggaatctcatagtctatctgtgtgtaatcatttattactttatattgaacttacagcaactactttgacaagctggcatcttttggtgacattttgttcacttcatgtggcattatggatgaagttttttgagcacaagccttttgatccacgagctgtcctgggatttggtgtattaaatggtatatccattggattattaaatctcagcttgggttttaattctgttggtttttaccaggtacaacccttatttcttttttgtcgttctagctgctgttgaatgtgatatcgtgttcttaacctcgttcttgtatacatgtcttctcttcccttgatatcagatgacaaaacttgcaatcatcccctgtactgttgtcttagagaccatcttcttcagaaagatgttcaggttagcactgatattgtctaagtaatatgtcttttttccattacatgtatgatgttggtactcttggagatagctgtattaggattggtttagaaattgatattggcctaacgtcgaagtagtacgtctgtcttccaatagtttattttggtttactgtggaatggttgagcaacttagaaactttcttatgtatcctttatcccttttccctttgagtgagtaattcttcttcccaaagtttcttggttccatacttccattagtttgtcaaacgattttcaggtcaaaggcctaatgatccattttatttcatttgcagtcgaaaaatccagttttcattagtcatccttctccttggtgttggaattgcaaccgtaacagatctccagcttaatatgctgggttctgtcttgtcgctactggctgttatcacaacttgtgttgcccaaattgtatcctatgcttatattctctttcccctttccatatgtcttctattagccagtggttcagctaaatagtagtctttgttggagtcgttgctgttatcttaaccagttatatacagatgaccaatacgatccagaagaaatataaggtttcatccacccaacttctgtatcagtcttgcccatatcaagcaatcacactttttgttactggcccatttttagatggtctcttaaccaaccagaacgtgtttgctttcaaatacacgtctcaagttgtggtgagaatgaagcaatatatgtggaatggtcttcattattgcttctacatatttacaaacacaccttgtttgaatgcagttcttcatcgtcttgtcctgcctcatatctgtttcagtaaacttcagcacgtttctcgtcattggaaagacatctcctgtcacttatcaggttctaggacatctaaaaacatgcttagtgttagcatttgggtatcttttgctgaaagacgcattcagctggcgcaacattcttggtattcttgtcgccgtgattggaatggtgctttattcctattactgcacactcgaaacccaacagaaggccacagaaacatcaactcaattgcctcaggtaaatagtttcaccttcccttttggcacaatgtgactcaacttcatttcattatatgcgtaacgagaaaacaagagttgagaattgatgttgtgaatgtgtcttgtctcagatggatgaaaacgagaaagatccgctagttagtgcggaaaacgggagcggattgatatcagacaatggagtgcaaaagcaggatcctgtatggaattcaaacaaagattttcaagcgtagagctggagctcgatatctgaaatctgttgtagtatcagatttcataggtttccgtttgtcaactttgatatctctcttagagagaatctacagcttccctttcaaaggaaggggggagaggattagaggaggaacagctttttgttgatccatttcatatacatattaccaattttggcttttataggtttgtatccagaaggccttttcgtggctacgattaaggaaaatacgaaaacaaaagtgaattttactacttttgtagcatggtttattctactttatatacctaagaaatatgagcaacaattacttctgtaatgactttttactacttcgtagttggtacaaactacaaaagattgtgttgtttttacatgatactttataatatctatattaatatatttagtcgtgtttaatcaaaaaagcaccagtggtctagtggtagaatagtaccctgccacggtacagacccgggttcgattcccggctggtgcattgagctatgatgatataggcttcagcattggttgggtccattgcattcttctgaactatcagttgatgtatgccacacctctgagctcttctttttttttcctcgtcaattaattttttaaagttttgtctgcctaaaaactttcttctttttgattaatcatattaagcatctcggctataaaaaccacggtctactaacttaacatgcattggactagttttagtggagagtgttcgagttaaaatgagaagctcacgattgcataacggaacatttgattcgctaggcatctccatttgtaaaagtagccactccaatacaaaatggtcgatgatggtgagtgggtgagacaaacccaccaccacctcaagaagatatatttctctggttaagaatttgaatggttgacaaagaaacggtcactctatatacttagaaaatatagtcatacatagacaccatcggtctagttataataataaccactggattaatgcccagtgaaaataattgagtagccaaaacatgaatataacaatatcccaatttacatacaacaacacaaaggaggttttacacgattctatagtacaaactcataacaacaaaaaatcacacttttgtttaacagttgcctttatggctttactacagtatcttgtccagggttttcacacataacaatcacagtaaatcgtttccttttctttgcatcttccattccttttgtacacgtaacatctccggcttcccgaccatcagctaagaaccagatgcgatccataacgatgatacagtatgtatctgcagatatcataacggttttgagtttcaattccaagtctacccaattctgaccagactggttttgcacaatcttgtgctttaatcctaagaaaaatccaactttcttttgtcatgaaactgcaacaggtccccttgtgatagcttggtcgtggtatatggtgtctgatactttgctcggtggccagtaccggaacacagatcttccaacgatgttctctattggaagtggacccctgcatgcacattcaccataatcaatcatcaatggggacgcacattaccattaatcaacacaattgccaactattaaagacattaaaagaatgctcataatcgatcatagagtttaccagttatgagagtcaaagcttttgttgcggttatcaccaaggacaaagacataacctttggggacaaactgcaaataaacatgaaaagcaaacattgttaacaatctgatactcaacaaggatgaacaagtggtaagtaaaagttgctcaccattggttccatttcatatgacattggttctaagacaaaatcttcttcttgcacaatgtcattcacaaagagcttcccatcacgaacctgcatggtacatcatctacaggttagacaaaaatttgattaaaaaaacagaaaaaggggttaggtccatttctgaaaaaaaaaacttgtagtccgagaaagcctctacacaaataataccgaccgaggtgaaaaaaagacttcaatgggtgaaaaggatcaatcaacaagtggattggatataagggcttacttcaacccagtcaccttcacttgccactatcctttttatgaatacatcattggaactgtagccatattccggatattcctgcaattcaaagggagaatatcatcaaattctttagtttacaaaagttgatacatctgaataacaagaacaatgaactgtgacttaccagcaaaattggaggagccttgaagattactatatctgaaacctctggcttcctgaaaaagtatgagacctgaccaacaccaaggcacacaaacggtcagtttagtcataaagagactaaaacagcctcattcacaaacctacatcaagcaactaaacaaagctcaaggtgaagtctagcaatcacctatagaaaaaccttcacattcaatcacataagagtatcatacaactatctccatcctaaaacatgcaagaactaattccagaaccgtgtagaaaaagtcaccatccatcatcagctatgttttatgattacaattatacatgaacagactcagaattcataccttctccgccataacgcgatcacccttgtccaaggtagggtacatagacgttgaaggaatcgactttggctccgcaagagctgatctaaaaaggatagaaacagtaaccgccgtgaaagcagccttagcatcctcagaacaaacactcaaaagcttattaacccatccacttcctccattcctcgattccttatcatcatcatcatcacaaactgttcctcctttatccacgtcatcaatcaccggtggattcttaatccatttcgacccttgaagaaacggaataatagaagaagccttgaaagatgaaacccccagaacattcatcgttgacgactcatgacccgtcgttgacttcaatatcgagatcaaacccatcacaagcgggctttgacttccttctccgatgagctccctcgcgatgctaccatacatcgatgcaggtcgattccgaggagatctatcgaaatcacgcttgtgggagaagaatctaggacgaaccaaggattcaaagcagtaaccaccgggaccaacacgggtcccgacgagattccgagcaacatgggtggagtaagtgaaagtgattcttatcgccataactacgaatttgatgaagaacttgaacaagtaagggtaaatcgaagagtcgtaaagcaacaaactttcagctaaagagagacttagaagaacaagtaacccatttctaatcaaacgatcagtgaattgtaaacagaatctacgaattgaaaggtcggactaagtccgacgagtcaaccggaggaaggtgaattcactccggcgagattgattggattcaggtgagaagcaaaaaaccgtgaaaggtggagactttagagagagaaagatctgggtatgcctaaagagaagatcttttagtttgagattagttgtgcaatcaaaggaaaggaaacttcttggcgagtagagagaaatggtgattggtgaaggtgaaactcttttttctcaattttaaaattcatttttgttatttttagcagaaagtcaaacatttgaccgaaaaggaagaagaaggagataagtcaaatccggctgctgggcttattgggtcacacgatcatgtcgtttcatttgttatgcttgacgaacgaaaccactatattttgtttaatattactttcttttaagtaaggataaaacatgtcattgttttacaaaaaaattaactgataaacatttctggttccctgaatatactttttttttttgtgaaagggttttcttatataacttgaacataaaaagtatacaaaaaaaaacaaacaataaccagaaactagattggggaagaagaccaactaaggtacttaacaaaagaagatatcaaaacctatatatcttgataatgatggattctttttggtttgtcatgttaatgatagtttttagtgtagaacaataagaaattgactgaacaattgttaaaaagagtaaatatgaagagaagagtcacacatgagactctgctcatttgtgttaaaaaataaaataaaaatgactcggcacattctataaaaaatcagatgcgacggtatattctattagaatagtttaagaatacagatcagattcctgagaattgttctagaagaaattttatttgaactttctttgacaaaaaaagaagatattttatttgaattttaacatatgcatgcctttactatttacttcccttatgaagtgggtctacatggttaactatgggatttattgtaactctgacagactaagcagaatcagtactgtataacttcaaataattttacaatacttctatatatatatagataaataatgaatttgataaaaaagattcctgtatttctaatattataatttaatatgtatcatagatccttatctaatgtcaaatatagttaaaacttaaaagtagaaccacagtgcaaagttatattatatacatatgtaaattcaaatatagtatgcttgatacattaatgttaattttaacttttgataagtacttttttataggtaggtaataaatacaaattaggtcatatgtgtggatacaaatggttcttattgttaggtttgagaaatcaaatcgagggcgtaaaaaaaaagtaacatgaatcatatgtaagtttgtcagtgggggatgttaacatgaatcatatgtaagtttgccagtgggggaggttaacacatgaatcatgtaccgttcattgggtgtggtttaatacctagtcaagtcgttcgtacatgacatttataatcatcgtaccacattaaataattgtcgacaaatcttggtttcaactttcaacaatctaggggttttttcttcttttttttttcttttctttcaggcttatatttagattgggttttaagtggtggtcaacttactaatttaaatacgaaaactcttctgttatttagtgttttaaaaccataaaactatttgctatgataaaattgttagaatacactccaatatagatgaattttattttacaattttttttgccaaaatcaaaattgttagattttttgtagactaaaaaaaccattgtgtgattgtgtctacttccgatttgagcggatatacagacttagtcgaggaactcgatgttaagccttgcttcttttgttgattaaataaaaacttcttggactagttggattagataacttgttgtgtatacttatatatgtgatgtccttcacttaaatgtaacacgttatagtactgaaaacataataaaatgaatcagttgcgacttaattcataaaccatgttagattttggatgtttccatacaacaacaaaaaaaatttaaggattcaagcaacgtgagtcatgacgctttagcaatgaattgttttcctttctgtgagtgagtgaaagatcgaaaattttgtggttgattatttagagcataaattattcctctcaagtattaaactagtgactttgacccacacattagttttcaaaactattagaccacccatttggtttcaatattttcaatgttttataggtgataaagttttcgcaagttttcgcttagaagattatgagtactcgaattcaaatgcatgcaaattccaaaacaattattcgtcctttccttctgtatgtcacatattttgttgtgtatgtcaacaactaggcttttttgtttggtatctataattcgttcctttttttagtttgccggatcagaatgtattttatgattcatatcttctacaaaagagccggatatactatatagtttcctagtttatgttaaaatttatgtatccactttgttccatcaaagttattaaaaagataaaagttgcaagataagaaaaaataactacatacaaattgcaaacaaaaaaataatattttataataaattcctcattttgaatacataataatatatcgtttataaatacaacatatatcatatgcatgtattattattacaaagtggaatgatatccataatttaaaatgtttgtatttgtgatctgctttgcttctgaaaattagttttagcatttaatttattcagtaagttatggtgtacctatattttgtaagttaaaggttatgtggccaagtaggagagttggggacctctctttgtgtctctacatagttttgtaaacctcacatctctttcttcgcttgcattctccaaactccaattttttttgtttctctcaataatatttgtgttcatactgtttcgctgtttccaatacatactaatggataacacaaaccgtcttcgccgccttcactgtcataaacaacccaagttcactcatagctctcaaggtttgtctttgatttagttggaaatctaattgttcttccttttggtctacgctcattcatttgacctgtaacattaaattgttttgtgatgtacgttttcactgatattttgaatttatatactaactaaaatgcagaagtgagtagtatgaaatgggagtttatcaatatgaccgaacaagaagaagatctcatctttagaatgtacagacttgttggcgacaggcacgtaacatttttcttcttctgtttatatattgatctagttccaaatagaaaaattaaattcttgacctaattgtattataatatgtgtgaaaatatgtgctttaacaattaaatatttttgtttgtgtgtgagggataaaactgtttgccgtgattcaagcttctatccaagatcatttttaccttgttctgaaaattcggatgtcgtgagagtcaggatctgtccacaccaaattttggatcatatattataattgtttttataaaaaaaaatatccggatctatagttatatatatattttgaaagttttttttacataaaaataattttagataccaaatttattttaaaaactactttttaaacttaatccatattttctaagactgttcaatatttaatttttattttttaataattcgaatctgaagcttatataaagaatcgatgacttgcctaacaattgttataaactatactataattttttttattttataatacttccctttgattctaattaattcaagtcttacaaaaaataaattgtttcataaatatatcaagttttctatgcattctttagttaatcatgagatgaactgtaaactcgaaaaaaaataatactattggtttagagttagagaaatttattaatcacaaaatgatatatttataatcaaattttaattattcgttcttaatatgtgttaaaaccttaatacttaaattaattagaaatagaaaaactattgttgttttaaatttatataaatatatagactgttaatgtaatgaaatcaaaaatgtaattttagttttaataattcatttttttacaataatcagaatactaataataacatatatatgttggtcacaaattgaatcatatgatcaggtgggatttaatagcaagaagagtggtgggacgtgaggcaaaggagatagagagatactggattatgagaaattgtgactatttctcccacaaatgacgcaaaagtcactctctttaaaaaatctcgagaatctccctgtttttctatttctcatcctcattaaataatttctgtgattgtggacaagaaaagctttattaagttgtcgagtggggttctcctcatcattaaatctgttatggtcacggaaattaccactttaattggcagaaaaaacctctatgattataagacacattcggttaaagcataagcaaccaaagacccgaatatgattgattagatacgagataagttcattataacaatgcatgaaaagaattcaactagttaatgggaatatgaaggtagaatgtcaaaaacatgaaccgtggtatgcaagggttctatccaaaatgagatcggaatttggcttgaatgtgaagtttttccttgaaaaatgtacgaatgtggccaatgagaaggaccgtagtgctacttgtgacgcccttgacccatgtggattctcttccatcagtagcacagatcaagcctcgtggaataagacagagaattatcgatgatggttccgttgaggatcggatgctgtcaaatgtgtcgttcagtatgttgagaagatgcattaccaaaatcactccaccattttctatagagccaaaatattgggaacattcgtagtactaatagtaataggtccaagtaatttgcggaaaagttagtgggctttaaatataaaacatgactgaaattgggccgtattcgacatttagttgtattattctctaaatattcagaactctcaataaaatcactctctggcgactcaacgttggccagagaatcggagagggacattaactgctggcagactggcagagtggcagtaaccatacgccgaaagagatattctcaacttgtcccgtaaatcaacatctttacgagaccttcatgcaccttcggttctttcattgtttctgggtggttggtgtggcaaatagctagctgtacgtttgaggttgccaagaactccaaaactcagacagtacgtgagtctcaaaaagtttttcctcagctagttggagatttttagcagaagttgaccgagaatgattgttagtgttagtttagattctttgataatatactttttccatgttgataattatcgttatagagtaaaattatagttaactaatgttgataattatagttatagagtaaaatcttaacattcatacagtaaatatgtgtaagttttgtgtaggaggctaagttgaatccattctgttcactcatataatgggtgcgctgaagtgaatctacgcacttcacatttaaaatcattggaccactttagagacatattgtggaccaagttcttaaatcgatcaaacatctaccaatcaacaagccatgtatttattcgaacatgcatgtctttttgtttgtttttctagttgatacttattgatctggcttttaaatttggcatcactcgtatatatatatatatatatatatatatatctcgtagatacgttattgtcttatagatataaggtatgtctttgtcacagggcaagctctaagaacgttagttgaagtgacatactgcaaccatgtctgatgtttcaaatttctttccaagctctaaaccaagaaaaagaaaataacttatcaaaagaacaaacttgatttagcaagagcatcaatacacatgttacaagtacgaagctggaacgagacggaacactgatcaaaagagatcgttgaaattagaaaccaaatcatataaatgaacttacttcagccccagcgatgacgcgcactactcttttgcccatctaactatctaaataggcctagtcgaggataaacctttggttcttttcgttagttaataggcctaggatttgtcttgtactaattaaatgttgtataataatgtatacatatatatatatatggttctttatagtttcacgctgagacatgaacattaactgagacaactttaaaccttgaatataattgagcttgttatacgtgtcagtttcttattacatcaactgaatttatttatcactgagacatttattgactccagtcataaatagtgcgtatatgtataattgtgtaaaaaaggtatgtaaaatgtatgttgagaaacaaaaaaggtaatatgtgtagaatgctaaaaatgaaaacaaagtacaaaaaatcagaaatttcattggtgtggcatagtggttactggctcggatctactaggacgagtacgatttcggcccacgtacagatctaatatcaccgcaccaaattaacagattgttggagtttgtccaattttcaagaagtagattcaaacaatactttcagaaacggaacaaaagatctaaacgatattggaaaagtctactgttgtaactttcctcacaggaccacatccccatctccgtcagtagaagaaattccaaaataataaaaataaaaactgagaataattgatatgtcaaataaattagaactagcgatatactgcagtgaatagtagattaaactatgttagaatttggttgtttctacataaaaccccaaagactagtaaattagtcatgacgctttagtggtgaacatttttctacatttaggaaagatcgaaataccaccattttcactgtgaccacaataacgtcttagatgatagaaaaattgggcaagttttcgcttaaaaataatttagtactcggattcaaatacatgcgaattccaaaaaaaacattctatctccatcatttttcttttggttgtgtaattgtgtatgagtgtatccacaattcgggttcaacgcggagctggattttttaatatctttttgtatccataacatgtggttttttagataagtctttatgattatacccattgtattttcctaatgtatttgttgtgttcacataagactttacccttaagtggaacccacaggacgaaaattctccgggacattatatatgtgtatttaagagcaaatcatgtatccatagttataaattttagtgtttagtatttgataaatattactccaatttacaattatatggtggatattcagatattttatccagttgtatcaagagcaagtctactggtccagtagtcctcattacggtagcttgggacctccttttctatatctctctctttactcttcgtcacaagttttctatatagttttctctacctcacatctacttttttttcattgcattctccaactccaaaatcatcagttgtatattatttgtcctctttcactttcaaataccaatggataacaccaaccgtcttcgtcaccttcgcagtcgtaagcaatccaagttcactctaggggataccgcaggtttctctttaatttagtttataaattataatcatccatttaacttagctacgtcctccaattttcattgatattcatatttgattgaaatataactaactaaaatgcagaggtaaatagtgtgaaatgggagtttatcaatatgacggaacaagaagaagatctcatctttcgaatgcacagacttgttggtgataggtaacatcttcttcttctgtgtatagatatgtcgttccatattaaattttatatcttctttttttctctatatacaatcttacatgaagtaactcatgtcttttttgtatcttagctatctttagattctctcatgtacttttttcaaccctttaacagcattatactatataacaactttcaaaaaaaaaaaaaaaatcttacgacataattattttacttatatgataatgctcgagataactgtgggataactcttttatattagcatatatcacttccaaatatgcttggctagctcataaacgttggtacgaattttgagtattaatcatgtatactcttgatgttacttttttgaaaattcttatatattttataattagaacatattttaaaaccaagatttacttttctctctattaattaattcaattcactatagaaaatatagttatcaaatttaaataatgttttttataacatatgcaaacattcataatgaaatagctaattaaaaagattttggccatgaactgaataatactaggtgggatttaatagcaggaagagtggtaggacgagaggcaaaggacatagaaagatattggattatgagaaactgtgatcattgttcccacaaacgacgccgagtccacaaattttaccgtttctctatttctcctccttaattttatgttattatggacaagataaaagctttaagttgttgagtagaacaaaacttcgatcgatatttattcttctcatcaatggttgtctaagttattgtcaattctacaagttgtgccactcgtcttgttccaactatacattttgtaactccgtcaaaaatattgataggaaaaaataatgattaaacgaggatattttgaagttagtagatagcaaagaaagaagattaataaaattcctagtgtcataaattatcgtgaaatttagcgtttaccattccgacaaagatgaaggaccactcacacacaccttacactcagatggtataatcattcatcttctcgagctacctctattcttgtctttaattaacttctggcccttcctttcctccgccatttaaattataattccacttgcaattcatttgtgtttaagagttaatttacggttaagaaagagttctgacgatggaaaatgttttaactaacatgcaagtaaggagttgtataagctaatataagactcctaactccttacgtgcatcataaaagtatggggatccctaaaagaatgcatgagttacttaaggttaattccacccacatgctatcaccataattaacaaaccactctcaatcaatactatcaaatcacataatctcatgcttaagagttaagacacctaaatcgttcatacaatcatgctcacattcacatatcatatacattcaatttcatgcacatgttcgtatgcactattgttcgtaaccacttagctatctcaaccatccatcatttcactatcttaaccatcgagccctcagatataatgcttggcatctctccatctcttagtcatcttgaccctcaaacttatctgattctcaagatagtgagagctcaggactcataatataggagttttagattttgctcaccatattgggccattaagccctgtttccttttttagtccaatcagatcctataattccagtgtataccaagcttcctgatctttaaacacttttaggcaaatataatttcttgtcctttcttacttagaaccattcttcacatgagaaccatcatttgtgtatatatattaataactttcaaaaccttaataatgatcacgacataaaatctttataatgagagcgggtcattacaggtgaactcctttgtccgtcatatcagccgtcttagaagctcgtatgtgcccaatactctcaggaccagccctgagctcgtatgcattaattactgatctggttttaaaatttgtatatatacgtacatagccatatgggatacttcaaatgtatgattttgtctcgacagcttttacaagtttagtcgaagtgaccagacaacagctgcaatccgaaagcatgtttcaatgaagtcgttctagtccatgactgaaaatttgttatactgaatgttgtcgataactttccttttgttaacgaatgcttgtcgataaatttatatatatccagtattatgatcacataatgataaattagaggaatttcatatttttgaattggtcttagctaatacgtaccacgtaggatcaattttctcctaacctacttctttaatatatagtgggtaaaatcataaatggttcattctgatttcacgctgagaaaatgatatgctcattatataagtaccgatttctctaagacaactttcaatctgtcaggaaaagaaattgatacgtccgtttcttacagttactgcatttattatcactgagacgataattgagttctgtagatgcataaataggaattatctgtagggcatgcatatgtaaaattagacacacacaaaaaaatctaaagagaaaaaagcacaagaaaacaaaagttttgttggattttgctagtattatttacgacccacaaatctatatcacaacacgaaattaacggtttatggactttttttgtccaattttcacgaagtcgaaaatttcggggaaaaaatttcacctaatgttattggagaactgtaaaataaaattatagattatgtacatccacattccacagccatctccgtccgtaaaaatttctaaaatataaaaagaaaaactgtgattttaaattagaacttgtaggattacgtgttcataatatttattgagaagtgtatttgcatgtgatgtttttcactcgattttaatacgttactaggcaaaaaaataaaactagcacgccattttagtgactgttaaaatgttctgttataggtcagaaacaaaatctgatcaaaatttattgtgagcattatgaactttttggaatagtaaaaaacaaatcgaacgtatcacgaaattatgttttgacgtattcgatcgggatatataaaaacaaaaatgtgaattataaatttaggaatatatacgtagaaattccaataaaaaataaatcacctatctctctctctctctttttatataactatttttttccctcacatcttttctatatcttgcattctccaaactctacattttcagtttctctgtaaatttatctaatattcttctattttccagtagttatggataataccaaccgtcttcgtcttcgtcgcggtcccagtcttaggcaaactaagttcactcgatcccgatatgactctgaaggtctctcttcaattcattactctacactcatcctcctaactcgtcagcgttaaattatcttctcatttaatttttgtttggataaaacgaaacaaaaatgcagaagtgagtagcatcgaatgggagtttatcagtatgaccgaacaagaagaagatctcatctctcgaatgtacagacttgtcggtaataggtaacaaattctcttcttctgtcatgtccgattcaacatattttaaaaacaactagtattttataaaattaaaaaaaaaaaaaaaaaaactagtattttataatttaaaaaaaattcacatggcgagagtaacaaatcaaagctgataaagtgttatgttatggtaaacatgattctagagtagtttagactttcgaacgtgtttcgagaaaaatgacatgccaatatttaagcaatgacatgagtattttacttgtataatttcaaaaaaagttttatgttgttgataaactgataaaatgtataattaacagaaactaaaatttcttcttttcttaaagtgtgatgattttaaaaacagtgaaaggattgaataatatattggctcttgaatattattgtctttatatatatacattttaaatttcatttctgcattatatatgttgactcctgaattttgataaatgttttttcagaattttgtgctcgtctataattcaaaaacacattatatgcttgaatattgattgtcaggtgggatttaatagcaggaagagtcgtaggaagaaaggcaaatgagattgagagatactggattatgagaaactctgactatttttctcacaaacgacgacgtcttaataattctccctttttttctacttctcctcttaatctccaagaaaatctaaaattgtaaagaaatcaaaataaaagctttcaatcataaaagtagaacaaatcttgaatgtcttctcatcatataaatggttcagaaattgttgaatctcttcgcaaaacaaattagaataagatcaccttttctaaatccgtgctcttaatcttcacttagtttacaatcatggttgtcaaagttatatcaattatcaatcgttaagttgcagcttacaacacattatagcaagtgtgccatttcaaagatattgaatgaaagaacaatcaccaaaatgttaaagaaagatatttttagtgtatacagtcgacaagcaaccttagatataaagattcttacagatgattaaccattctcagaatacagatttaacactcatcgctggctaaatcaggcatcttcagtgggaaactgcttctccacatccgcgactgtcttctttgcatcttcgatctctggaccttccttctcatccgtctcttccaattccgcctgcaaattcagttttcattagagacaaaagacagagtacgaattcacagtttcctctgtgtccttattcatcatttttcctcaaagagagactaagatggtttcatgcaggggattaatccaatcgctatagatacatataaaagttatagtttgataatgtactactgctcttaaacttcaaatcaccgctcagcgtttcttataaactaatacataaagctagaccgacgcttagcaagcaataacaatggaaaatgtagtttaccaaagtggacttgaggtcagccaatgcagactcgagacgtttgtggcaatccggaatcatcatcctagactcacccaacacattttcctgcatcaccacatacacagattaggaaaaaccaagtctaaacacagcacaacacagcatttctagattctgacgaacaaagacgggctccgaatcttcgaatacagagagataaacaatgaaatctgtacctgttgtttaaggtcgtagggatcagcacctttgtccttcatatcagcagtcttagccgcttctctctcaacttctttctcataagagtgaagctctttcacaatccttttacatgttgatgtttttatcttcaagttccttatcgttgccattggattctgagcaagtaccaaacacaggacaaccaaaattagggtttctacatcaccagcgaaacaactcaaacgcaacgattctataactaggttttgcgatctcctttaaacttcgatgtcgaatttgaaattgaaatagggcgattagatcaagactaatgtaggtgataattctacgattcgtgcattgcaatagatcgggaacattttggaattcatcgatttcttttacttgattccgatctacattgagatcgacacaaagctagattcgattgaaaattaaaggaagatatactgtgaaatagaagaagtagggtttagaaacgaaccaggcgatgatgggagaagaaggttgcttccgatgaatttgagagagaggacgcggcgtagagcgaggaggaatcgaagaacaacaatatacagtttccgatttcgatttcttctttttcctttgctttcaattctgaattattaaaaaaaaaacttaatactggatatgcactcacttgtgtgctcgcattacgacataaaaatgtaatttgagttttatttcatttctttgacaaaaaaaaaaaaaaaagttttatttcatttatttacccttttttatagatataaaatatgtaaatcaaacttttatatcgtacaatttaagtatatattttgtgttttattatgtcaagttcattcattaattttaaatttgatacaacaaaagaataatgtagaaagtcaagtatacaatgatggatgaatggatttacataatgcttttttggtacgtaaacgttagtatttgctaacaaagtattagttgcgttatttttttcagaacaatcaatcctaattttaaatatttttattaaaaacactatgatacatattaatttacattataatttgttattgaaaataaaaacggagcaattttgtcataggttttttttttgtcaaccacacaaaaatggtttacaaattacaatgtaactttaaaaaatggtatacaactacactaacaaccataggtcacaagaaaccacacttgctattttttctagatccaaatttcacaatttaaaaccacacaaattttctagaaggaatcaatatttggaatgccatttaataaaactttaactgttatttttaaatatattgaatttaaaacgaactttgaatgtttgtgtagttttagacgaacaactaatttgtcaagttagctaggtgatcaagatagaaaaaagttcgtgtgaatcatattttgttcatgaaaatttggtgtagtttatggttatgaggttatctcatatctatgtataaaattagaatgtagaattttgtctgacatacttgtttaaaacttaaaattatgatacatatatcacctattctttttaattcttaactttataatccaaaactgcaagatcatttaggcccattgatttgaatatttgttgcttatgttcactcagaagtcagaaaccataccatatcacatgtcttttgctgaaacttcataagccaactgtggtaggggatggaatttgcaacagtggtcctcttcttcttcttcatgagttcattcttcccttcttcacagaaaaaaaaaaacccttaaggattaaatctcatcactgtttctttcttctttaatcacatctcagttttatgtgtcagtggtcctctctctaccttcaacgattatccaatgttcttcatgcatatatataaactccgtacttgttgcgttttcaaattgttcatgtctcttcactgttgtctttttcttgttgctgtttaccgccattttcaactttgtattttcaaaatattcaaatgatattggcgcaattaatccatcttcatattctaagaaataatcaaatcttgaagcatcatcttttgtgagtagttttatatgttcataatcatagagaagacaagaatatgtttaattagtgataaaaaaatctgtcttaattaacagtgttttcacgcccttagtgatcatgtttgtattaaaacgacaatatgataacaacttttattatttgcttacattttccaaaaagataaataaagaaaacaatacataaaaagtgggattcaaagagagaatctccacagttccatctaacttcttatgaacatcaacaacaagtcaacaactacaatttcacaagcagaatgatactaattactttcaccattaggttaactactattacattaagaattatttttttctttactttgtttttgtaagttgaagccagatttgttcgaaaacatggatgataagatcatgatactcctttggattcaaagtaaggtagcaagcaagaaggtcttccaagtctttcgaagctctgatgttgttctcttctatcatctcaatcattgattccctgaaatctttctttggatcaacggaccgcttcatcacagcgaagctctctagaacatcttgtttgctctctgatcttctagaagtgcttctacgagtacctgagagttgaattctaggtgaattcactcttttgaggtttatcccagcagatggttttcttccactagaaacttgcctttggtacttcttctcggctttatattcattatcatcttcatctcttgaaattttcacagaaagatggcttttctgcggtttcttaatcggcttgcttgcagtacaagctttctctaccgaatcaatcactttgaccttctgcttggtgaaagctttgttctttgtgttgatcttgaagttggaaaattcaacgaactcatcatcatcatcctcttcgtagaaactatacacaaaagactcaggggaggtttcaatagccgggaacaagctgtaagacgaatcttgatcgttgatcttgctcttgttgaaacttgcagatacaagaagaggaggaggagtcaaaggtttaagggatggcttgtaaagtgtctttcttttactcatcttttttgtgtgaagagagtttcttggtgagttatggtgaggaggattgttagctactaagctgttggagaaataagagtgttgaggaagagaatctgaggaaggtttcttcttgctacaagtgtttgaggaagaagaagaagctttgtttttgggtttagagtgtttagtcacgtctttgagcttgtggaaccatgcatttgggagcatctctgaaattctgaacttgtaattccccatcttgtctctctctttttcacaaaagtttgtgatatttctcttaagaaaactctgtttttgtttccttagataaagaagaaggtgagaaagcaaagttctctatgtgacagataaagaagaaactgaagattaaaattggaaactagtggggctactactagaaaaagcttaaagaatgtcttttattagtatcatcatcattcatcatcaacatcaacttgagacatcacatttacacgcttgtgctcacataattaataaatttattttatggtgaatttttaaaattggttgactaattgaaattgtatttggtgaaaaactgaaaatcataagaacataacttttatctaaaatattatataattaagggaatagtacaaaaataattataaaacagagaatcagttgcttctgatttctgacagatttctatcatcatttcatggagattttactcttcatcgaaatgataaaataactgaaaaatgtaattagcgaattataaaacagtagcaaatgtaaacagttttaaagaatacacaaaaaggttgaccaaatggcaattacaaaagaaaaatacagcttcttttcctcgaagtatgctttttgattgaaaatattaaaacgtttctaaacggacaaatcaatttaataaataaaaacaaagttttcacaattcaactaaaagtttaacatatgtgaatctatctaggttaaagactcaaagtacacgttataatgaagttcaatagtttcatttcgatgcttctttgaatttggtaaagtgtgaaccttatcttaagtttttaggtagaaataatttagtatagtagcactttatgttatattaaggtgatacagatacacaaatgatgaaattaagataatcaaatatgttccattttctcctctgaataaagtgggatcaacttttgagtcataataatgaatatgagaaattttttggtctactttgtccactaacgccgaacattttgaggacactttttttcttcttctatacatttccactttccagatcaaatgttttggcaactacttatcttttaacttcgagaaggaaaaaaatgatattcaaaaatcaaaataaaacattttccatccttactttaaataagcacaagtgattattcatatttaaaaaatggagatattttcactagacgtgggactggtttatgttcaacaatgttgacctaccaatatatcaacgactttttgagtatacaaaaacaaaactatctcatcatattggattttgtttataagcaagagccaccaaacatttgcaataagaaaaccttttctattctccattgtttttaaaaacttcatgggactccaccatcatgatcagtttcacacccaaagacgtgaactccacgcaacacaagccaatcctctaaccttatacacaccaaaacaaaacaagaagccaaagaggatcacaacaacaacatcatcaccaaaaaagcttcaagacaatgagagtgaaagcaactttgattaacttcaaatcaaagctttcgaaatcatgcaacagatttgtctctctcttccgcttccgagttaaaagacctgtctttattagacctcttcgtgcccgtcatggcaatgtcaaacctagacatcaacatcatcattccaagaagccaatctgttcttgtctctgtttcctcaattcaagcaagaaccataagatgagcaacgccaaacatagaagttcctcttgtaagacaacttcgctacaaaatctgttttaacattgaaattttatcagcttcttgatctctttgttctcttattttgccattgcagttagtgtgaacgatgatgattactccaagtttatgcaatcacctcttacgccagcaacagccaagaagctcttcacttcacccatcacgacaccttactcttcacggaccaggaaatcgctgaacgcaagagatacatttgaagacaatgctgtggaagatgcttgtagaagctttgaaaactatctgattcatctgattgttgaagaagggaaaatagatgacttaatggacatagaggaacttctcttctgttggaagaatcttaagagtcctgtcttcattgaacttgtctcaagattttatggagaactctgtagagacttgttttcaggtgaatgaacagatctagttaaattgatcaaaacaaaaatgttttaaatctgtatctgtcagtacttgtggtttgacaattattgaatacaacatctaaggtttctaagtttaaagttgggaacaatgtgtgaagactataaaagattgtatgtttcggtcaataccggtcggaccggttcaaccggatttacttaccaaactcgtctcttgcaattttattgttgaataaaaaaattatcacaactgtgtggacacgtgtggttctccgtcctcactcctcaagcccctttcattttatcccaactgtgtctggtctgattaatgaaaaaataaaacaaattcgaagaaatataaatgagatttttgtagctagctcctccaaatccaaatcgttgcgttaaggtttcttcaagtttcaatctttttgcaatgaattgcccagccatgactgcttctccttcttcttcctcttcttcttcctactcaacgtttcgtcctcctcctccgtaagttttggatgatgattataatctctgttagctccacattgcaactgattagtgttctctgtttattgttgttatatgcagactcttgccacaattgagtaacgattcacaaagatctgttgttatgcactgcacaagattaccctttgaagcatttgctgctacttcatcaaaccggcttcttgggaaacattcattgcctttgagagcagctttggttacttcgaaccctttaaacatttcatcttcctcagttatctctgatgccatttcatcttcctctgttatcactgatgatgccaaaattggtgtcttgttattaaaccttggaggtcctgagactttagatgatgtacaaccctttttgtttaacctcttcgccgacccggtatagtatatctttctctgcatccttgaaatgtttttgattgtgtaaagatacaatctttgtctgtttcatacgacttatgttcgttactcaatcttttgttaggacattatacggttgccgccggtattccagtttcttcagaagccattagcacagtttatatcagtagcaagagcacccaaaagcaaggaaggatatgcatctattggtggaggttctcctcttcgccacataactgatgcacaggttagttataatatgccaatatgatcttggttactctgcttttcttatcctcttgtcattttagaagcttttctctctgttttgtccaagtttcaagtactgaaatcaaaacgggttagttagtgtaccaaatttcaagaacaatattgtcttttgctctgttttgtccaagtttctccttgcttgcatccaagtaaaatggctagttataatcccaaagtgtttcagtttgctttattttgtaaatcgcttgtgcttgtgtgagacacctcaacttgagagtagtatgttattgagatgacgcaaaatttatacattcttatgttgtacctgttatactttcaccaggctgaagaattaagaaaatgcctttgggaaaaaaatgtaccagcaaaggtatatgttggtatgcggtattggcatccattcactgaggaagccattgaacaggtatgttgaatatggtgtttggtagtatcttgatttaaggctaaaacacaaagttttcttttcgtatttgcatcttcaaatatttgcttacatttaaagtaaaccactacattttgtgtttttatcaaacagcatttgcaaaataatgattgaagtatgtgtgaacacctggagtttgcactttgtgagtcttactcgttttctttatatatcttgtttcagataaaaagagatggaattacaaaactagttgttctaccactttatcctcaattttctatatcaactagtggttcaagcctaagactcttggagagaatatttcggtgaggctcgcacatctttcatattttagtataccaagaccatatctgttttaatcatttacctttctgtgcttaatagagaggacgagtatcttgttaacatgcaacatactgttataccatcgtggtatcagcgggagggatatataaaggcaatggcaaatctaatccaaagcgagttgggaaaatttggttctcctaatcaggtaaacaatcttgtgtctgctcactagtggaaagaaagaattttcaagtcttttgtagttttttctagctttgcctattgaactatcctaagacgtgcttcaaaccaaaatatatgttacaggttgtaatatttttcagtgcacatggcgtgcctcttgcatatgtcgaagaagccggtgatccttacaaggcagagatggaagaatgtgttgatctaatcatggaggaattagacaagagaaagataactaatgcttacactcttgcttatcaggtacttcccatttttgtcgaattagttgtttgtcaaaaatttcactcattctgttgttttattatgtttaacagagcagagttggaccagttgaatggctgaaaccatacactgaagaagccattactgaacttggtaaaaaaggtgttgaaaatcttctggctgtacccataaggtaatcatctgtctattctctgccacaaattctctcttctctggttatttgaaactcacgtttgtttctattttaacagttttgtgagcgagcacattgaaactctggaggagatagatgttgagtataaagagttggctttgaagtctggtatcaaaaactgggggcgagtacctgctctaggaacagaacctatgtttatatctgacttggcagatgctgttgtggaaagtcttccatacgttggtgctatggctgtctcaaaccttgaagctcgacaggtaacaaacacttttcatcttacatctagttaaagctccacaaaagaatctgttatcttcacttctaattcttttcttttctggttgggcagtcgttagttccgctcgggagtgtagaagaattattagcaacgtatgattcacagagaagggagttaccagcaccggtgacaatgtgggaatggggatggacaaaaagtgcagaaacatggaacggaagagcagcaatgttagcggtgctagcactcttggtgctcgaagtcaccaccggaaaagggtttctgcatcagtggggcatcttgccttcattataataaagataacgtatagtctttttctctatgaaaacccaatccaagaatccaaatgtgagctttcacatgtggaataaggccagctatgttattatgctctcttcttctctgttgtagaaatgttgacatttaaatacttcatactgtatcttcataaaacattaaatgttgacattttaatcggcatgctttttcgcaacgtgaatgtttgagtcacaatacttttttttccagtttaagccatttctgctgcatagttcatagcagtgtataacaattcaatgaatgaaatcaagtctaaaagctcaactctcaatagaaaaagtattacaatagatactaacatcataactaagacctagacgaactagaagaaaaacgaaaaattacaagagcaacaacagtcgtgctaagcaaaataggtaattctatccgtctacaaaatttagatatccaagagtctgcatactgaaacccgggtggatatgtcatggtggttttcggatgtcgaagtcggatcatattttcaacaaaaggaaataaaacattgatgtgtttagctacacaacagacttcatgagtctttggattatatttgagcaaccgcttatcgctgtcatggaagtaaacattcccttgtttggaaaccgttattggaatgcaattcatcatcgaatagttggggcaaagatatccagggagtaaacgtattttgtaagttttagacttttagtccacgtctcttcttgtgtatccatggtccatatggctactttccaatgatgagatggctcatagtcacagatcatggctagacgatcttcaaggttggctagtggggcgagtgtaggtgatccatgcggtcttgggacatcacggaactgttcagtgtgaagatccaaagctagaatcttgtaaccagtaactaggtcgtaccagtagatggacccattcacaaaggccgaatgatgatttggttggacatagtaaggaagcggattcggcattgtccgccattcaccaattgttaaatcaaggatttcgaattggttagtatcataaaacatcctcactattttataggttccattaactttgtctttaccaaatcccatggcccaatatccagggtaataagccaaccaagatgctccttcaattacgcgatgattatcatagcgactggtatctactggatttgggccggaagggaatcttaagaattctccggtgcaagggttcaaaacgttgacccagcctggtacggggatgcaaagtagactaaaatcgtatggatttgataaatatggaatttttgcttttttataattttaaatctcttgcgtataaattctaaattatatagtgagtatgtgtttttttttagatcaaataaaagtaaaattatgaaggataattatgacgatttatttataaatacacattcaagtcttcactgaacttgtctacagatttgatggagagctcatgtgtgaaaactataaaagattgtatgttttttagtttcacataacgaagaaacttggatttattaactatagaccaaaacttgaatgtgaacaataatacaaaccaaatgatccttgaacaaagaattcttttacttacctacaaaacttgttaaaaagcagagagctctttacatgaaactattgaaataatcaaatctgcagagtgagagtggtgtttttactcttatgttttagaaagataaacctgagatttaaatacagaatctccgattttaaaccccggcattgtgacgaactcaacgcttaaatcgcctcttccatcttctttttcatcacccactacagattccatgtagacacctgagaaactggttcctcttctgaccacaaagatctttgctttaagatctaaagaagctgcaaacgatccaagaatccatacccactttgccattttagcaaagatttggtaaaacatcgttcttggatgcttaccaagcaaaactagtcccctcatatccaaattcccaaagaatgaagcctccatcgatggatgaacaactaaaagatacttctgaccgcagaatcttgaaaacgcggaatctgaaaacgctgttaacgcgtctaaaggatcatcgaaactcattagttcggtcacatcacatggattaagctttatgccgtgaaacattctccgaacaatgtatgactcaaaagcatacttcttatctgaggtcttagcaaatgttacatttccaactatagattccactgctttctccaagttccaatctgtagctttcatcagggtgatcaatggctttgcaaagtcgtgaaccgactttgaagcagctcgaaaagcgaattcaaaggaagatacactcacaatcctgttttcgagtttcctattctctgcaaccaaacattcttgtttcttaatcaaagagtgtatctcactctccttagctctcacttgtgctttaagtttctccaaatgcttctcattcacttcaatctcatatctcaacctatccaaacaagaagcagcaatctcggtcttctttgcgttgagctgtatcgttttgagatagagacgcttgattcttcgtaaagcctcgagctgagacacgacgaggttgtctgcttcaatgatcttgtcaggatcataaggcaaatgagcttgttgaaactcaagatacgctagcttaagcgatgaaacaatgtcgaaaagctt

SEQ ID NO: 311 - DNA, 79574 bp, Arabidopsis thaliana
aagcttctaggacttcgactagaacatctccagggaaaaaagttgctgctcctgctaagaaagtggctgtgactaagaaggctccggctaagagtgtgaaggtgaagtctccggcgaagagagcttcgactaggaaggctaagaagtgaagaagattggtttaggataggttttggggggagattgaatacatggtggtggttagcttctatagggtagtcttgtataattgaatcatccttgaaggagcttgctttccaaagttttttacttgtttctttggtttcttcttgaaacttttttttttcttctttgtaagttttggtttgtttgaattttaagctttttgatcaatagctataatgtgatggtttcttcactcttttacttgttcagaaactgttatagaagctttccatttcaagcaaatgacattcacatgtttagttctgtcttactgtatcattgtctttgtggattcttcagttgtggttttgaaggaactggtctctcttaagaacaagcttgaccaatgttaaggtgagattcatatgttttcctctgaatcatgtcatacatttgcttccttaaacatctcttaagaccaagcttgacaatgtaactatctcttaggttaggtgttgccaattctctctttactagagagattcaattttgtttgatgttttaggagttacataaatgaatgacataccgggaaaaaaaaagctaagagatcttctgcgtttatctatcttcatctctcatcttggtgtttcttggagatactgtttgaatctttccactttctgaattgagtatttgagctcttgttgaatgttgaacctagaaggagaaagaacaatgtctttccatattgatccagcttcacaagcaggatttggatttctgtatagctcgtaaatagaatctgcattctcgtttaacctccctacattcttcaaacagtctatctcctctggatccactagcaatgtcttttccttctctttccaccctatcagctgcataaaccacatttgttcaccatggatcctcactttcattacttaaaacgtttcaggaggaaaattttaacctttggagaaccttcaagagcattggtgcagtaaagtctagcattgtcaactaagttgcaataggtaagaaacgcattcgcaaacctcttgtgagatctcagctgagacctcactctaactgctcttctacacattatagctctcctgcatatatagtaaaccaaaaccttatgttatgaaaacacacaattgttttaaagaccaacacttggaacattctcacctaattcctcgaatcactgctaaatatgcatcacatacaactccaactaactctatcctgtatggctttctctcccttccatcttcttgaagctgttgcctttcgcctatgcgttcccaatagttctctataacatctccattctcaccaaccttgtagccagctcccattctgtaacgatggcgatgcacattcctcgccattgttatggtctgaaccacaaatggtacccaagagagtgttccatccattatcacgtctcgcccttcgttgagagctgtaacgagcagcgatgatgctgcgtctgttgatgattggtgaacctgttttatttccatttcaccgtcagagtttcacaacattggatattgagtataacaaaggtaatatgcagtatatatgaagttgattccttgcacattttgtcgctctgcaggttctttttacgttaaggattcttattgcaacctataaggaaacaaagaaccttacgaattcagcagtcttgatcatatcaacatgacctctggcgcttaaagctctgtatatcacatcagattctttaaaagcatcggcttcaatcaccacagcatcagctcctgcccaaaacggtctgatccaaagcacacaagcatgtacaggttcaatgcataagaacactgattaatgacagatatgttgatactttacttactctttgagaatgtctttaagcacagtgctctttcctgcacccataccacctcccataagaagtagaaccgggcttcggtccttgtgtgcaactggagccataacttctgtacactctgagtcatcaacagatgcgatccccattgctttcatttcctctaccaatgtgttaaacactcttgccacttttagatttttagtcaccctctcaaacctctgttccctatatattaaccaaggaacaaacaatcattttgggaagaatcattaaagagaacacttgttttttagactcaccttgtagccgccatgacaatgtgctttagcttcttcttaggctctacatcggcactgagtatctgaaatgtttttggtctattagtaatataacaaagaagggataatgaaagtttattagtaacctgactgatcatgagatccgcatggctccagtggtaagcaaagtaactaagaatacatctctcaaactcttcaacgagcttaatgaagagagaatcagcaccaggctcttcagagaagaagctgtatatgtcttcctcacagctgcctgattttcttatgtactcattagctaatttgcagagatgaggacattctctcctgtccttgaatcccatctgccgcactacaaaagacacaaacaacatttccttaatatgcatcataatctaagatcaggaagatttcaaggaagctatgtagattgattttaccaacatagtgagagaatctctcaagcttctcatggcctttgtgtttttgagacgatctgagacgagggatgttcttggagtgacgtagcttccttagacggaagtgcagtgcaagggctaagagtaagccaatggatgagattactaaaatctgtgcgaaggtcgtcgtgttgttgttgctgttaaactctggaacacacattgatctggatttgctttggggatcatcaagagacatgagattaagattgttagaactctaagattgggtccattcttgagtttgttttctgttacgagacaatgtatctgctttctccacgtgtgttgtactaaaatagctttgagtcctattactccggaagtttcttagtttgctttttgtgtgatttgactcaccattttgttttaataaccaaactctcatccccaatgtatgatataatagtgttttggcaatggttttataaaatctattcgttaaggctataacataagaagaatctgtcattggatatctattggaaaaatgagttacagagaaaggctttgaaaataatattctaaacctaagtataagaaataataaattcagatcagagaagaagtaaagaatctaaagagagatgtcatatgtttttcatataggagctgtgcaagttgttctgaaatggccagcctgattacaccggctacatcgaacaacccgcttttgacgtccacggtcctctccttgacttctcctcttctttggccgtggtggttgtcttaaatccctaggtggtctgataacaatctcttcaccatcctcaccactttctccggcaggttctgttgttttccactcagttttgtctggaactggatgtatggtttctgcgtaagttcgccggtaatttgctacagtgaagtaactctctgtgaacctgtatacgttctgtctacaagcgaggagggctgcaactgcgtggctacaaggcaaaccgtataactcccatccacggcagtaacacgtacggcatctaatatccactatccattttccttcactggtcatgacctcgaattgtgcttcgtttgctttgtgaactgggtacaaacgacattcttctatagcctcaaggacatgtctctcagcagatggaactagcataccagaccattgcatgcttgtttcacggcgttcattgaacagagtcattagttggcgacgaatactctccaacatttggattataggaagacctgacgcatcttgaacccaactattaagtgactcggaaacatttgcagtcagatgtccaaaccttgttccttcaaagcagtatgtggcccattgactgtgctggatgttacgaatccacgaggcagcttctggggatatctgggctatctctcccatttttccttcaaattcaaagtcggtcagacattttgctgcttcccaaacaaggttcacaagaatggagttgttgaactgagtacggacgctttctgtgagacaatggacacacaagccatgaaacgccgttggaaaattagtatctactccatcgacaatggattgatctctactagataaaattgtcagctttggcatgttttcggaattaacttcaagcagctgacgcaattctgagaggaaccactgccagctactatcattttcttcactaataatagcgaaagccaaaggaaacactgcaccttctccatcaaacccagtggcaagcagcaatgtccctacatatttgctcttcaaaacagtcctgtccaatccaataagaggtcgacaagcatttagaaaaccacagattgatgcttgaaaagaaatgaagaattgttggaagctcccatcaactgggcttccatgaaccacagcaacgctcccaggatttgttctcctaatttgatcacaatatcgaggaagaaggcgataatcttcttcatatgacccgcgaacagcagccattatacgttcttttcccctccatgcttgcttgtatgttagtgtaattccatgaacttgatgaatttgctccagtatctccttgggtttgcaatgaggatttactttcagcctttctgtcacagcatcagcaacccactgaactgaagcttgatggtgaccaaggtgtgaaataccaccacatgtgtgactcccatgaatagtccttattgtaaaggttggtagaccaggaagcttggcacagtgaattctccaagggcaaccctcactattgcacttagcagtgaagcgagttttgtcagatttaacagtctgcatctcaaagcgtaaggcaattgctgcatctctgagtgctctcctacacgcaaggacatcagaaaattccataccaacgatcaaattgtgctcaggagctgtttgcagagaccggcattgaaggataggaggagccaactctagctgctgagaaaggcttatgttcaggccaggtaagggatccctattcatgcaatgacccaccgccaactgtaaattatcattgagatcctgagaaactaataaagcaagtttatcattctctgaagttcccgagtcatcattatcaggaaaggagaggtcaaaagtatggtcatagctttcattttggttttcctgagaatcaacctcatcttttccttccacaagttgcttttcatgtatttcttcactgtgagtccctgagttttgtagagccaatgcatgttcctggccgtggttccaaacctcattttgctcacgggaaacacctatctgcaggttggtctcttgtaatggttccaaagcaaaattgtaatcatgactagtaaaaagttcattgttctgtcgagcttccatatattgctcctgcctaaacgagatatcgtggtttcccgacataatcagctcgttatttgtcatttcatcacagtaacaaaatattggccaacaaaaacactaatatctcttacagattctaattcaaccagtagtgtcttttatagacctgtaaagaagaaaacaaagtatgaacactaacataagaccttgacagaaaagtgagaacaaaaaacaaataaaagagctataagttgtataaccataagccctcaagatatagcacaaaagcaactaacttggaagcattcttctataaaaacttatgctccaatcattgtttctaacaaaaatccaaaccaacactagttaagagcagagattaatgttttagcctaagttttacaactaccaccatctctgaaattgaaagctctctgttggggatttagctaacgaacaaaacacccttgagccaccaaaacccaattcgaaatttcacaacttgatcaaacaaacacagattaaaaacagagatcatgtacgagaaaattcaatgctcggaacaatttctaaccaaatttgacaggaaacaaacgaaggagatcggaaatcgaaacttacagatcaaaaggatatgaagcggaatcttcagaatcaccaaacgcgaaagggatgaggcaatttcaaagataaggaatttggcgggtaagcaaagagaaagaggttgaagaagaaaatctggacaaaggagaagggcaaagaaggccgacgtgatttattcttgctgggacaaaaagggcaccttcttctctcctcacagttttaggttttacgagggtattatcgtcatttccagatttacacaagtcgtgtttttttttttggctacacaagtcgtattattggacttttccttgctagtaaaatagtaagttagtaaaactaaccagattcgagataacttgagaagtactaaaacccacatataatccttggaggaagaagaagaaaccttagatctatagatccatttggcgaagtgttaagaaagaaaaaaatcacttaagcaaatcctagattttaaagatggtagatgatcatgctgatattccgaacagtgagattgtgccatcgtctcatgcaaagtgttcattgatccttcgtgtggcccatcacttccgtcgcacaatcttcggattgcttaactatgtgagttggtaacaaatatacattgatatagtgataaaactttcccatcttctaatctcttgagttgcttattgtttccatcaaagtgttcatggtgcgcttgaggagtcaaaaaggattaaccccttagtacttgatcgtggtgttccacagtttacgttttcctgttggatccaaagttccttagtactattaacatatataaatcattctcttctgtgttttttttcattgtccgttttatttactaaacctcctaatttttttattttatttttattttttttatttttttttagtttgtgtagaatgatgaaataaatgaacaaggaaaatttcagcctactaatatactttatttgcaaagtttttgtctagactaggaaaaacaaaaggtagaaagtcttggctcagaccactttggtagtgtccagcatggctacttggctagcaacaatgaaagaagcaaagctttggaggctagcgttggcgcaatgcaaaaggagctccaacagatgaacgatggacaagctaaagcactagctccatctcaattaaactatggacaagaacaaaaacacacgatttgtttagacatatttctccggctttcattttattttctttaaatagggattttgaaatcacaagttcctacatacattgaagcatagtgcataaaggaaaaccatggaaacgtgagatactgtgatccttgaaaggatgaaacagagcacgaagattcttatttatttgctgcaacaaaagaaagtaatagaagaactttttttttatatatactggggttgtgtctctttcctcggtttggtcgccggtttgatgtctaaccaattgttgtctaacctttctccacttcaaagctttgctgcgattgctaaagcaggcaagttgttccttggcggaaacttaagatcctcccatccctcctcatcctccactctctcaaagtactgatctaccatgctatccgtcacgtcctcgagtcgccttggctgccactataaatttcagcaatacaacattatatcaacaatatgacatagcaaaaataataaatggaaagttttgttaaacctttggattcctatctttgtctatcaatactgctctgcacccctacataagtaagacacgttcttgtaattatggtctacaaaggacagtttcaggatgtagatacaatcggaaaagctgacaaaacctccacaaagtctttgcttatgtctcccttcatcacatgacacaccattctatactcacggataagacactgccccaccccttgcaatcttccttctcttatctgaatttcatacacattgttagctttctgcaattattacatgtgacagattttgggaactaaccgatcttagcgagattttaaggcatgatggtgaagccttctccaatgcttgaatggtagctaagagccaatcgtttggtttttgtgtgacctctctctcctaatcaacacatgatggtagagcgcaatatcaaaggtaactcagtgaactcatgattcatgatcggaactcacaagtcaacatatgctgtatattaatgaaaaacttacaagtgcagagaaaatttcctccactgttcttttcgagaagcacctatcaataacatctaacctgcgttagggagaaaattcaagatcctgtcaagagcagttgaaagatgaggccaatacatgatcatgatcaataaacaatacggagaaaatgtttttacaattgacttagaatgcttgcgatgttggcatggaaaatatatattcggcaaaattatacacacttgcctgtggtaagaactatgctggttcaggtgcggatactcagcgtatgcatcgagaattgttgagataaaggtttgattacttgaaccaactttgtaaagctctgcttctaatgcagtcaaactctgtgataaataagtaaaattaccaataaagatcctggacgagctttaactaaaattaatctttttaaatgaacactaaaatctaaaaccgtacattatatcatatcaacttttgttttttttgtctttttatcttatggaattttgttaaatttacaattatctattttaggaaccaagaattttattattttatagtgtactaaattatcgaatattaatttataaaagttttattgtataagaaatattacaagagtttaatattttttatattgcggtaatctctaaggagaatactaaagatgtgagcaaaggaagttcatactattgaaggcacaaaatgagttgcaagaccacatgcaagcatttcggcgccatctaacctagctcctgtaaggccaacatactctcctgaaagaagacaagaaaggttgagaaaactagaaatattttgcgcatgcagaaacaaagttaatattgttaccaaaaaatccagggagtcttgacaagaagtaagaggcccctacatctggaaagagccctagagctgtctcaggcattgcgaaaaccttgaagaaactcaaaagatatgggatgatatatataagcatatttcatagtgatgtctatatgtcatccatggacatgtataagaaaagaataccgtgttctcagttgcaatacgaaatcgaccattggtagagagaccagctccacctcccatgacaataccattcaaaattgaaacctatgattatatttaaaaaaaaaagaaaagaattaatgaggtattaaacactttgagtaaatcactaaagggacagtctgtatgatgagaccggagacctgaggttttctatacgtggacaaaacatagttgagcgtgtatccaactttgaagtaatgggcaccgcgtatcagtttgcctaatccacgaaaatatagaaagactgtgtagtagctgaaagtaaacaaaaaggaaaagaaagatggtcatgggagggttatatattgagttaccttgtaggatatcacgaacaataggtggaatgtccccaccagcagaaaaggctcttccctgaccctgtggagatgttattaagtgtgtgtaaacagaggagataataaggatatagtgattacctttaggacgacaagtttcacactagggtcttcttcatatgcaaggaacagttgcaacaaccgagagacctagagaagattgattcaaaccaatatatatgtaactagggcacgtacgaaatggaggaagaataagcaagggaacgattcaataccatgtggaaggacagagcattaagctgcttgggtctgttaaatgtcaagattctaacgctcgatttctcttccaccaaaacctgtgatcgaactaaattagagaagaagtgaccgtttaagatttggagaaaagaagagaaaacaaacctgagagtgagatgccatcttcttcttctccttttttttttcttacagttttccttcgcctttgtatcctcccggacatgcatatatatataggaaaatattttggtttttttttttttgtgtagctaaaataaagtttaaaagttcttatttattttgttgttgatttatataaatctcatttttatgtaaacaaatgaatgaaaattttaatacttattatgaaaacacaagtatgaaaatctgagtgtctcacactcatccactagcattaaagcttacataagaaactgctaaagcacacataacttaataaaagtccaaaaatccatgtaaatagggtttcgtaataagtagattaatagatatgtatgtaatgaaccatcaatagagtaacatgaagaattgtcactttgtgcaactctcttgtttcatcgtttcataattcattcaatgaaaaagtatatcatagtttggtatttcttcaaatcattttttcactaaataaagctttaatgaactttaatctatctcattgagctctctaaaagtaagaatctaattttgctacttatatcaaatcacattccacaatctacccgtttttataggggttgaaacttgtcagctcatacatgtcctaaaagagagcgttggtttaatttcacattcctattcttgcatcaataagatatgacaacattgacagtactacatgtgcctaacctttctaactttcgtcgtgatcgattttcctttgttttctaaaacaaatagttttttattttctcttagtttagtatttattttatcttatagtcgacccatcttttcacttgcacattttcaatcaaacaaaaattacgtcgtacgtgaataaattgtctttataactcatatttcccttttttccattcatcttccttttttgtccgttggattgatgcgtgacactgagaaatagaaaggtggtttcgctattatggttcttttaacattgacttttgctagtatggttgaaaaagatagattcttatttggtatattatatgtgactttattttggtttgttgtaagaaatcattatttatgacttttgttttctgtcaagtggttgtaaatcttaattatactttgtttgtttcggtcaagaatatatatttattaaaaatgagtgtcgtagaatactgaaaaataaaaggaaacgagtcagaaaaccagaccaatcggtcttggagaagactaatcgatccgactgagtttatgccatccgtcagctatccgatccatcggtccaccagtctctgctcctagtttcagctttgatccctgcttttgatccaaacacgttcgaaaccacccaatcctatacctaaaacatgtacaagattcaaaacacaataaaaaagacacaaaagatagactttaacacgacaaatgaaccaaaacgactgctaaacataggacaaaagacaccaaaaacacaatatattagaaggctcgagctagtataaaataagaggaatgtcatcgaggataatcttcttcgcacacaaaaaacctagctagcaagttacatttgtactatataatttaatttctgtgtattaatacagttcatcataaataccaactttttcatttctttgtttccttttgttttcggtctacaattcttctctttggttttatcaagaaagactaattccaatttatacttatattcacaccataattggaaccgaatcttgcatccataatgtgtgttcctcttaataccacaaatcgcgaccggataaaaataaaaatctgtgatgaatgagtggtttggataccataaagtggtttagatcaaaaatgtaatgaaggctctaatatcacataatggaacctccaatcaaagcatgtgcaattacaatatataacacaatatttccgtaggaaaaaatttcagccttgattttgttttcttttattttcaataaaaaacttggaaccataagttcctacatacacgaaagtaattacataaagggaaagtagtggaaatatgagatattaaactccttgaaaggagtaaaagaagcatgtgtattcttattttctacaacaacaaaaaaaaaaagaaaaagaagaatggttccgacacagaatcttggttaggtcattggtttaatgtctgaccaatcacatttttctacttcacaactttgctgcaattcttaaagcatgcaagttgttccttggtgaaagcttaagatcctcccatcgctcctcttcttccactctctcaaagaactgatctaccatgctatccttcatgtcctccaatcgccttggctcccactataattccaacaatacaacatatataatttcaacaatatgacataacaacaaatactaaatggagagatttgttaaacctttggattcctatctttgtctatcaatatggctctgcacccctgcataagtaaaacatgattttttaattattgtcttgtctacaaagtaaaatttcaggttgaagatacaatcagaaaagctgtcaaaacctccaccaagtctttgcttaaatctcccttcatcacatgacacaccattctatactcgcgggtaagacagtgtcctaccccttgcaatcttccttctcttatctgaaatttatacacatagtcagctctgtcccattattgcatatgacacattttgggaactaaccgatctaagagatattttaaggcttgagggtgaagacttcttcaaagctcgaatcgtagttaagctccaatcatctagttcttgagtggtctctctctcctaaccaacacagagtgcaatgtcaaaggtaaactcaaccaacttaggaacggaagtcgacatatcctatatattaatgaaaaacttacaagtgcagatataatttcttccattgttctcttcgagaagcacctatcgataacatctaacctgagtaaagtaaacaaattttgcattatagatctagttatacatggattctgtaaagagcgattgaaagctgacaccaatacaaggttgatatttataaaacatgcaacgtattgatcatgaccaataacagaataaaaagtttttttgcacatgatccctaaaaagcttgcgatgttggcatgacaaaagatatttggcaaaatcatatgcacttgcctgtggtaagcactcttctgtttaaggtgcggatgctgagtgtatgcatcaagaattgttgagacaaagcttggatcacttgacccaactttgcaaagatctgtttctagagctgtcaacctctgtgaaaattaaaggagtaaagttactatgtaagcaaatagtgcttaaccaatagtagctaaaaagaaaatctgaagtgtaaaagtctttccaaaatgtcgaaggaaatagagacactaagaaaatttacagatggcaagttgggttattgacacttatacgtgatatataacacttaagacaaaccatcaagtcagaaaaaaaataagcaccatgaaataagacttttccaaaaacaaataacattttaatacacgagatcataatttcaaacagtttttggcaaaaaaaaaaatgccattcaagaggatagatttgttacatagcattcctgtgtccaaggtgcgagttcaactaacaacaaacaaaaagttttgcatcggcagctttagtagtccattattgccaaagaaatacaaaaaccatgacattctcgtttttactatattgtcaagatgttataaatggtgtgatccgtgcctcctctaataggagagagggcaaatgcccaaagtcacatttaaaaacaaaagaactagaggccacaatataaaattatatatgcttatctattttaattagtttgatataattattttttctagtcaaattttgctagattatatgaatggaattgattttttttataatttgaaacatgcatcttgatagtatatattattatagtatatagtaaggtaaaaataaaatattaaaaacaaagaattactaaaccaagagacttgattacatgcactaaataaactttttttttttaatttccctaaaacctctataaaccctggcatgacactacgttaacgttttaagtaacaaatagattgtgttttacttttcattatcataattttgtttcgagacaatagtatgattacttttttccaaacaaattacaagagccccgtacatggcggcagtggggaatactaagacgtaagcaaaggaagttcataccgttgaaggaacaaaatgagttgcaagaccacacgcaagcaattcagcgccatctaacctagctcctgtaaggccaacatactctcctgggatgaagaagaagacatgaaggatgagataacgagattggctcgaacttttgtggacatgcaaaaacaaatgacttaatgttgttaccaaaaaatccagggagccgtgacaggaaataggaggcgcctacatctggaaagagccccagagatgtctccggcatggcaaaaaccttggagaaactcaagatatggaagtgacatgagcatacttcagagagatctttatattagtcatccatacatggacatgttttaaaaaaagaataagtaccgtgttctcagttgcaatgcgaaatcgaccatggatggagacaccagcaccggctcccatgacaataccattcaaaattgaaacctataatttgaaaaaaaaacattaataagcttatacactttaagtatattctaaaagcacagtatgtgttctgagacctgaggtttgctatacgtggccataacataattgagcgtgtattgatctctgaagaaatcggcaccaagtctccatttacctagtccacataaaatagataaagagtgtgtaaaagcagaaaataagcaaaaaggaaaaaaaaaagatggtcatggaagggtgatatattgatataccttgtaccatgttttgaacaacaggtggaacgtcgccaccggcacaaaaggctcttccttgaccctttaggatgacaagtttaacactagggtcttcctcatatgcacggaatagttgcagcaaccgagagatctagagaagattgattcaagccattatataactagtgcaccaaaggccggaagaaattgacaacaaaggaaagattcaataccatgttgaagcacagagcattaagctgcttgggtcggtttaatgtcaaaattctaacacttgatttctcttccaccaaaacctgtgatcaatattgattagagagagaagaactgatcgtcctagtaaagaggagaaaacaaacctgagattgagatgccattttgtcttatgtcgtcttctttcttaagggacatttatatagtttttttttaaaggctaatttaaaaaaaaaaaaaaattgttttgggttgatttgttaatcacaatgaatgctatttaatatttagattaggttcatgaggtccccgtctatgagagattttaacttgcaagaaatggatggaaaattactaagaatctatatgttaactttggattgtgaaattatgagaagatgagatttcaaaattttgatatttttggtgttgttgactttgtcaaagtaagtattagtagtgtattacttgtgaacgacacatgagaagttaccaaaactcgttgagaacacagccatgattcggcctgacaaacccactttgctttttgtttcacaactcaacctaaatgaatatatgatatcgatgagcttcccaatgttttttttcttaatcattcaaggtttcctaatgtttcatttctttggttttttacacgaacttttggcatcaatagacttttcagatggattacgtcaatgaaagtaaaatgactacaaggcttgttaatgtcttctctagttctcttcaagaacctgaagtgtttcaaaccttgaataatacttgatgatcaagataatgttgttgaggcatcatcgttcgttaatattatgttttaattttttttgtcgtccttccacaatctttcaattgataacttaatcattgtcttgataacgttttagagatctaatggatttagtaaaacaaaggaaagcttgattggccaaaaaaaaaaaaaaacgaaagcttgacatgtgaattatgctaaattctcagcgttctttcatacgccgtagtagccatttcaagataatgttactgtatcacacgtttctttctttggccctgaaaaaatctcaatgtctgcaaatatcttaagatttattcaaagtttgtaacccataaaatcaatattgttttaaaaaagcatttcaaatatagtatacaacgactattaacgatcgttaatagtcgttgtatatcctaccaaattttctaccaaaagtattaacttcattgttaaccatagtttaagtcattaacctaactttgcagaaatgataaatttccaattatttaatggcatgattttgcttaaccatgtctatagttgtagaaactcacccatctataaaaaaacaaaattcaaacataatattgttttgcatatgctgattgataaatatttaaatacgttcaatgttttaagtactcccacatattgtaaaacacagaaaatattaacgtattatgatattattttgcgcacaacgttattatataagtaaggtggtatatatcataacacgtacaataatatatatagttacaaatcatactaatatttatgatactatatattttccggaaaaactgataactttattgttaaacttctttacctcacggcacgcacaacataagttaaaatttggttactattaagaacccaaaccggtacataggccaggtctgtacatggaaaaactaaaggaatatgttgtcatgccttgctcgcaatatagctggttggattaaagtaatagggaaggcaaagaagtgaaaaagagacaacttctatgtgaagcggagagcaaacaaaaggtttaaaaacgactaatgcgtagagatacgcaacatgatggaaaaactcaaaaaaagtataaaggaagactcgaatgatcgttttaaaaaaaagactcaaatgaaagtggatagaaaaaaaagactggataattcgtgtataatgtctaggtccggtgtatcatgacgacgccgcgttcagtgtgtcatcacgacgccacttgatctctttaataccacagttgtggtttttttttttatcgtggccattcgatcttttgaatactacagtttaaatttaaattaaaatgtaataaaaagacaactaatattaactggctttgtactaaaaacacgttatgtataagtcacatcaaattgttttaagtcattagttttaaccaaaaaaaaagtgaagtctttcatttttgtctcttctgccaattatctttaaaacaatttgtgtaatagtttctcccttatattcattgtaaattgaaataaaattttgaataagataccaaacataattcttgtacaaagctagtcaatatttattgtctttgttttcttgacatttatatttataacttttgaaacagcttgtataatagtttatcaattatcttggctgtgaatgtttgacaattggcatgcatagagaattgagaaggtggaaatattttatgtaaccagagatccttttcttgtttgactgagaaacttccacgcgttgtatctcaatcttttctcgaattcgttaaaaatgaatgacctcgtaacatgttgttgaagggcttcgaactgagggttcaatcattggcattttaggattagaaagaataattgcactctggtatgtgtaatcaatcaaaagtaaatggccgacaaaaaaaaaatcaactaaatctagtaatattttaaagcaacaaatctagtcaatattaattatattagttacgtaggattttaattatacttttttgcacgacgacaacattagtcaaacaaaatttggaatggcatgaggacagcgtgcttacgacatgtatttctatcaaacattatgggttttgttctgagattaatgtttaaccacaaacaatccttgaaaagtacacgacagaaaaaaccacaaacaatcctttggtaagaaaaatattactagatttaattaagttttgagaatccgataatatatcttatataataaaagtaggttttttctaactttacctacgaatgcgacatttatcactctattttgttgacacatgtacttatcattaattgtattttgactaaaataatttattaatagatatatcatatattcagaaaaatagtcattaaactataaaattactaggtattaaactataacttgaaatgattttttttctagcataattgcaactctcttaactaattacaaaatcaaatcttttaaattttgacatgatatttattatgttttatactgcacattaaacgctcacaactataaataattctccaattttataagatttttttccatttttagttcttttaaacaataattaattaaaataatttttttcaatatgatatgattaaaaagtttaaaatctggtaaaatttgatatcttacatttgctcatattttaacagtttttctgtttctatgttatttatgcatgtatatattaataagcatatcatatcttatttttacaaaataaatgtatgataaagcaaattacaaaataatttgttgatataaactcatacataatagttttaaaacattttattttgtaagtgattattcaaaacaatgataaaagaatagtaattatagtatatattttatgatgtatcatttatcaatatttaaatactacatatgcttttaaaaatatgatttaataagaaataaatgagaagtagatgtaaagctcacctgattaaaaaagactcaaatgacttacaaattattaaacaccatgcagttaaacctcattaaggtcattagtggctcaatgagattgaatactcaatgtctcatgtaacgttttttttttaaaaagaaattattagtttgttactcatgtaacgttcgtgttgtaaacgttcttctataattattaacctttattagttataccctaacaatctacttttctaatataaatagcaaatatttacacagacacaacacacacatatttacaagtgcttttgttttttttaacaattgaagttactcaattactgaaagaaaaaaggaagatgatttgctgtatcaccaacgtttacggcaagagtcctaaccttatcaatttgtctctttcatttaaggtttggactcatattagctttcagttttttttttttcttttagtttttgtgaatgatttcatattgtttaatgtttctaaaatggttatattgagtcttacttacatgtttttgttttgttctaaatgtaaatcgagaaatttttgcatctttttttttttggaagtaggcatcaaatgcactttaaaccatatatgaatatgaaagaggaagtaaaacgggcaagagtcccaaccttatcaatttgtctccttcatttaaggtttggattcataatagctttcagatttcgtttttttttaagtttttgtaaatgatttcgtattgtttaaagtttctaaaatagttatattgagtcttacttatatatttttgttagtttcttttttttggtaggcatcaaatgcactttaaaccatttaaatggatatgaaagaaaaagctaccatattatggatagtagagtcaattgcaagagaaagcaagaatcaaagttttgatcattcataaaatacaaaaattcaagcaagtgttttagttagtctcagaaaatgatggagcgataataacaggtatgaccacaataattatataactatttatttgtctttccaaattaaatattttgaattaaatttttcaataaatagttaccaaattttgttgacttatatgctctctaaaacaaaacttaattttttttctgatttttagtataaggaagctgaattcttagtttctgaagaaaacatgatcaacattagttcactcatattaggaaattgtttaattgttttctatcattacttacatttaatgacctttccaataattgtttttaaacctataagtcgaaatttttgaaagactctataatacaaattacaaaaatctatttctataatacacattagaaaattatatttaagaccggataatacattataaaatactctattatattgaagcaaacaaaatagattcttttatatgagtgacatattgaaatgatttaagatttatcttctccaagtttatattttcttaaattgttttttttatatgagactatttgacaagtcatcatgtacggtcttttatctatatacactatatccttaataatattttaaatttaggttgtttaattttttctatcatttatttaatgacctttccaataattgttttaaaacctataagtcaaaattattgaaaggccctataatacaaattacaataatctatgttatatacacattaaaaaaaaattgaaattaatgaaattgaaatttaaattcaaaataaaattaatttgctctctttaattgaaagtaattccaaatatttttttgaaatctttaccaattattcattataaacaacaaatttatgtaatatgatgtacacaataatgatttttttaaagagctaaacatattttaatatatataaattttaaaaaatatttaaacaaaaaaaataacagtgtaaggttcataatctaaaattaaaatttagaatttagcttttacaataatattttttaaactcataacaacaacaaagaaaaaactttaaacaaaacaaaacaatatttgagatactgtggaaggggattaggaaaagagagaatgaaaataaattgtgggagttaatttttaatttattgtgtgttgaataaaatggtgtggagaaatataattaatatatctatttatgatttcagttttgtaaataaactgtgggagttaatttttaaattattgtgtgttgaataaagtagagtggaagaatataattgatacatattttttatgatttcaattttatattaaactgtgtgttaaatatgttatttattatttattaagaattaaaaaaacgtatattgccaagtggaccaataaggaaagagtaaaaccttacttttatatatacatgaatcctaatttttttgtttcatttttaaaggttacctaaagtatagctattattgttgccattacatcacatataaataataacaattgttatataattttaaattaattatatataaaaattatggtttcaatttatcaaagcttataatatttaacttagagacatatttttcctactttttccatcatttgaaattaaaaataaataactctatgtttatgcgataataactggtaaacatcaaaattgaaaattttaattatttttagcgatatattaacaattgtttttaataaattatatatagaaattaacgtctttcaatacaattaacaaattttatatgacttattttttttgaaccgacatctgagatctttagtcaagttggagggtttttcattgaaagttatcttaaatcataagctttaaatttttaaatgtgaagaaggttcatctattgttttgactttcaaaacaattggtaatacatgcatttgcattttcacaaaaacaatagctgaataatttatgtttattttttatatatagtaaaacatactgtttttacaaaaaaaaataaaaaaaaattgaatgcaaacttttaatcaactaaaatgtctttgtaaaaaaatcataatttttaaacatcaaaattactattattaattattttgatcgatatattaacaattataaataagttttttaaataatttaatttaaatattattttatattcaaaactaaaaccgaatataaaatccacgcatcgcgtggacaacttctagtatatatatatatatgattaacgtttcaagtaaaaattataaatagtgaacttatcataataattagaagaaattttttattttttcatattatcggattcattatcattatgttggttcgagacaacatatatgattactttacaataaactcttataagagccatacatttttaaatcatcatagccctcaacatacgccgagaatgagaaatactaaagacacaaaggatattcataccatgaaggcacaaaatgagttgcaaagaccacaaacaagcatattgggggcatctaacctagatccggtgaggccaacttactctcctggacaagaagacgtgtaggatgagagaacgagataggctcgaacttttgtggacatacaaaaacaaatgacttttgttacaaaaacaaatccagggagctttgagtgcctatatctggaaagatcgtcaaagctgtctcatgcatggaagaaagcttgtagaaactcaaaagatatggaacaaacatgagcatatttcagagcgatcaattagtcatccatggttgcagtacaaaatcgaccatggatggaaacaccataggatcaacaacaactatcatgatatgtactaactattagagaagaatgctaaaaatttcgttaaccaagctctcgcaattccgttgaagtctcaaagatgggcaaaagttatgggaaagtagagagtttcctccttttggttattattaatgatcaaaagctagaaacaaaacacaaactgacaacaaaaaacaccgaagcaagattaaccaaagtaggattacatatggataatcataactaaaacaaagaaatcaaaacaccaaacataaaacaaaacccacaccaaaaggaaatagacttccgcgatgcatcaccaaaacacaagtcttggctcaagcctgtggcttataggagaaaccattgacagtgagacctccatcaacacaaatggtctgaccagtaatatatgaagctgcaggtagacacagaaaagccacaagtgatgaaacctcatttggctctccagcgcgaccaagtggagttctactaaccaaactcttctcgtaatcggcgtctttgaaaaactgattattcacaagatttaaagacataagaatgagaagtgtatgatgtcaattggaaaaaaaaaaagaagaagaagccagagtgtactcattgatgattacgtacaggttgagccatagcagtgtagataaaattaggagcaacagagttggctcttatgccatctcttgcccattcacatgccaaagtttttgctagttgattcaaagctcctgctcatacaagcatcaaaaacgataaactacgagacatctatatattaggttcaaagatactaattagacctttattgaaatggttgcattagcctattagaacaatcagttaccgttggaaatactttcaagtaagactatagttatccatcaagataattaaaatagctttaaattagtcttgtttgcgtatttataattgttactgaatatgaatgaaaacccttatatttttacacagatttgaacaaaaagtatttacgtttactaatgtaagaaaactcatatatgatttaggatgaggtcctaatacaaaatataaatctcagattaatcattcctactattaattatgacttcttacactaaaaccacttattaattaacttaactcaccattgaattcagttttaacaaactatatattcacaactattgcatcaaatcattccaaatatatctattgatgaatagtcagtctatttacctttcgttaaactatagatagatccacactccattgacacaacccctccaacagaagaaatgaagatgatgcttccaaattctgaagcttttaggagaggatgtgaaagttggctaaggtgataagcagattccaagtttgttgaaatactgaacgagaaatcggctgccacatattctattgttggctttggattaactacgccaacattgttcacctatgttgaacaaaaatgagttacaaaaatcctactatatatgcattacttaattggtgtattttccctatgagaatatgctcagtttctttaaagtaagattaacttacaagaatgttcagcttgccatcgaacatctttgagactgtttgcataagtgtttccctctcggaatgagaggatacatcacatattgaaccacttacttgaaaccctttcttttcccattcacttaaactttgattgagcagtgtttcagatatatcgcatacatagattctagctccaagaccggctagctcctctactatagcatgcctaaaccattccacataaaaagacatatataacgacgtcttaaataatccagaacaatatgggtcaaaaattatagctagagagtagaaagaccaacccgattccgctggctccaccagttacaagagcggtcataccctgaagactccatcttttatccattttctctttgcctgtgagttgcaatgactagagataccacataacatatatatatatatagaggcaaattagataaaatattactaactaatgacctttccaagcaatggtgggtctagaaaatttattcaatgggggcaaaaactataatcaatttttttcagttttaaaatatattaaaatgtccataaaactgtcatttgtcaaaaaaaaccagaaatttttacaattaaaatatataaattttctgttaaactttctaaataaaaaaagcaaagattaaaataaacagttacaaaggaacaaagaaaaaaataataatttaccaatgagttctcgtctataaaaaaccaaggaggagaataaaagaacaacggaaaatttggaatcaaaatttttagggttttaaattagtaaaattaagtagttttagtttacaaattatacctttatttataaaatattagtaatgttgggtcttttaaaaaaaattaaacaaaagatagtggggtcatggaaggagttaacttttttggaggcaattttttagttttttcgtggtggcaaatagttataattatctttaataaatttattttaacaaggtagagcatcaacattggacattttattgggtgtctttctttataataaaaatattaaaaaaactaaaataaaattattaaaatacgacagtgtctttaataagtttcgagagtggatgcaataataaaagaaaatgtgacttacgtaaatgaaaaacaattatattaaaaattacgtaaatgacaatggaagaaagataaattaagtaaatttcacaaacctaaaatgaatattcaaatattccgattttaatctttatttaaattttacagaatagataaaaaaaaagtttctgtaatatgttattcttagggttattctccaaaacaatttgttaagttgccattttctttatgttaactttatctccaaatatacagatcattttcactatgtttaatttattaacataatcttatatatatatatataatatcattttctacatattaactcctcttcgattttgctttagaatcatatatatttctcatctcaaaattcagattatatctttcggacataaatttttacacatgttaattaattaaataaatatataaatacgtcgaacatccacggactacaattattgtaaaatacataataaataataaacacatagttttttatgttatgttttttgtacaatgttatcatctaagttacgtgatcaatcatatatttcactcctaaaaatttacaggtataactagtagtattatatgtacgacaccattttccaaaacaattaatacgtaggttaggtgtgtacatagattagaagccatattggtgcataggttaggtgcgtacatgggaaaacaaagaaaaatgtaatcgtgccttgctcgaaaaattgcaggtgggattaaagtaatagcgaaagaatcaaataagtgaaagaatgacaatttctacgtcaagatgagaggaaccaaaatatttaatgacgacttaagcatacattagcaacatggtcgaaaaagtataaacgaagactcaaatgaaagttgacaaacagaaaacaaagactgcgaaagtccgtgtatagtgccaaaggttacgttccgtgtatgacgatatgccactcgatctttttaatactatagttttgagatttattttttaatattcttttgtggttcgttaggccggatgattaaaacaaaaatccagatcaatttcagaaatctgaaaaatccgtcaatcttgtcctttaaaatgtttatagagatctatgaactttgatgattgatcttgtagttcaaatagtagaattcttgcttattttatttttattttttttgaattcttgaatattttgggttttaattatgaacttagctctagatcccaatgaaaatgcagacactaattgttccagattctgactcaactcgtactgtcttttatagacctgcaaacaagaaaacaatgcatgaacattggacaataaaataagaccttgccagaagtgaggatacaaatagttcctaagggttcaaacttcaaaacttaaacataacaaaaagttcgcacacgagtagtttccaaaaaaaaaaaaaaaagtataacaaacagaggagcaaattagtcctcaagatatagcacaaaagtaactaacttggaagcactcttctatagtaggaatacaccgacactcttcttagtttgcaagtatcctataaataaaaccaatactacagacaaaccccaagcttcctatgatctccttggtccatcatgttccataactaaatctacagaagcggaatcgaatcgaaactcacggatctaaccaaaccatttatttcggttcggtaaggtttggtttctttgccaatccctactgataaccaaaataaactgattaggggttaaacttttccgggttggtatagacggttttcagctcaagcatcgttgtttttatatttttattttattttatagtcggcatattattaacctttttgacatgtgttgtgtgtacaactatttttcgttacacgagtcaatcaatagtttgtataacctaattcgatatatctagaaaccacatataccgatttaccatcccaaagcaaagataagatcaaaaagttagaaaaaccctccctctgcaaaccctagatctaaagatgtcaaccgagacttgtcttcctccaaacagtgagatggtaccatcgtctcatggcaagtgtacaaccagtcatgaaccgagacttgtcttccttcaagcgcacaatgaacaccttggcagtctcaagtgatgttgcattctttaacatcactctcaggttctggatccgaagggtattaacatatatatctatatcatctcttcatatgtatcccccttgttgttctaatctcaacgtatgtttcattgttttctatatgtatacttttcatcaatttcttcgacttttgtgtagaatgatgaaacaagggaacaagggaaatttaagcctcataccgatttacctcgtttgcaaagtttctatctagactattaccagaaaaacgtcatggatgtgatcaagatcattggcaaccagtatacaattttgaaaggtattgcccctgaccattggcagatctagttttaattgtcttctattacattaatatataaatgaaaacaacaaataaggaactagtttgcatcctacaagtttatcatctacattcatatttggcactccattcgttattctgctaattgaaacgatataggaccatctctttttgttaaacgagtttaatgcttgttttcactataatgcttgttttcatagaaattgagtcaagtgcacacagtgctgctattcgtgccatccatgctgcccttcccccccataaaattaacggggattcccgaaaacaagctgacaggtttgtgcattatacaaatctcgtttgctcaaaatctctccttctatttatgtacaatatctttctttctctactttcagttacattcaacatgcatgtgacactgctggtgttctcttcagagtcttggagcttctttcggaagatgtacaacttccttctgaggtatataattttacacatagctagttaatagattaccaatatatgtatatggtgatgtttgtttggaagtcgcaagaggtctgcgattgcgattgcgattgaaagttgttcgtttgatagcaactgcgattgaaagttgttcgtgatcgatttgcgactgagttttttgtttgcatgaaaaattagctatgtgactttttaaatggcgattagtcttgcgattgctatatcaacaacgagcatggccatatattgtttttgtcttatgtttataattgttaatacttttgctgtagtttttggaagccgacgctgatgtgaaacaactagctgaaatcttcaggccttataacattattcccctctatatttgtggaaaatattctatgaagagactacctgaggtcattccagagattcactctcttttaatttttttggatgtgatttcttgttttagttataatctgagtctaaagtgaacaaataatatttgcatatacttatatattttgcagttacaagctgctatagacgcactatctttcccattgtgcactatcttgcccttgcgggttgcttataaccccagcccagcccgagacagcgaagacctgcctgccgtgtttgagatcagtccacgagaacccatattatcattattattttcttccatattatcattatttttttcttcagttttttttttcctactttttagtattgattatacttttcattatatcgtctcttacttgcgattaaaaaggtgtcgtttaactactatgtaaactttggttatgactggaacgtctcatatttttgcaatagagaaacaataacaaggcatcaataaatcaagaacgactctctttcttgatcctattatgaaagtgacgccgggcttcccttagccaaatacgagttttgaactaacttcataaaattttggtatattcgaaacttctaaagtacagtataagattagtccaaacaatatccacctttttgaaagatttaagaatgtaaaaatttaccaattattacttaatcccacatacatgatacatcaagagaaaatacttttttttttttggttgaaatcatatgctttaaatcatatgaaatactaataattattatattttataggaatggaaaataaaatctactaacttttaatgtacaattaaaaaaatctgtgctgtaaaattgttggcaataatatatgtatgtatagtaatttttgtttttggagagtgttaaaagatttaagattctaaagcttatggtaattccataaaatcgggtcgtggagaagagttgcactaatttaggcaaactcgaaaacaaatcgttgaacaagtttgtttgattttaccgcggaacaaggaagagtcttcatttcccaagatttcacctctctcctctcttttgaccaaacctccatttcccaggtaaaaaaaacttctctcaagttgtttttacttttatgatccaatatcacgtttttgcttccatgttcatgcaaatctcagacccaagattctgagttttgcccacatttgctcctttttgttgttgttgttgttgtgatagtttttgagatgagtttcaatgtttttcaggattcatcatcaccagtctgaaagatggattcaaatcttatatttgatcaaaaggtcatcaacgggttcgcgccggtgctaacttacgcagcctgcgaatggttccttatattactcatgttcatcgatgctcttctctcctatcttctcgtctggtttgcgcgttactgcagattgcagatgccatgtttcctctgttccaagcttcttcatcctctacattggagattcttgctctgcagaaaccacagatcagaggtttcatcttacatgtcatgtcagaatcacggcaacaaccttgctgattgtcgaggcatgtgcgatgactgtctcttgtcgtttaccaaaatgaccggtccgaatccagatatgaacagattgcttctaggtaaattagggtatgatctgctctctagaagccattttgctcaccctaggtcttgttcttgttgcaataaaccgtggagaacgaggcaccatacacagagactgattcggttaggctctcgagggagaaactcctcaagtaaacccaacattcctgctccacggcatcttacccgacgaggaagcggtggaagtttgaagaagatgagagatcatatagcaacaagtggttctgagtatgttgatgttggaagccgcgacggtatggcacatgtgggctacacagagctgaagatacactcggattctgagtctgagttcttgttttcagatgatgatgcattcctccatataactgacttcaatgttgagccatctgagaaacgcacgcacaaatctcgaaggcggaaatcgtttgacgacaagaagatgtcgaatcataaacagcctgtcttgcaagacaaccagtataagaaaattcatgtagaagataatgaaactgtcgaatcttcaatgcttgggtataatcttgaaaacaggactcggcagaaacaacctgttaaggcaaaggagcatgatgatgtactctctgagcttataactatgagtgaagctcgtccgtttttactgggttcacctcgaaagtatgctgcaggagtagtcacacaaaatggtttgtttattatgctttctccgcttatgtcagaacatatgcattcacgtcatattgttccttactttgatgtttttcatgcagaaaatgaagctgaggtaagtggcagctcatctccttctggcggagaatttttgagcccttctgcagaaaacggtgcctctagggaaatccgaattcaagagcatgatgattcctcagatttttctcaaaacatcaccagttcagctatggagatagaagaatttgaggcagctattgagcaaaaagagtctgatcacatggatgtgtctggttctgttgcaaatgaaccgtctagtgatgaggagaatgaagttgaaggagactccaagcctttgatatcgaataatatgtcagattctctggaacaggaacagtcaggtgaggaagaaagtgaggttaatgaaaacaatgttgcagaagaatacttcagtaatgaagaagaagatgaggtcaatggacataccgagcccttgacatcaaaaagtgagtctggttcatttgctgaagaacaatctagtgaggacgaagatggaagtaatatttattcggttgcaaaagaccattccagtaatgaagaggatgtggataacgaagaatctgagccaatgacatcaaacaatgtgactggtgttgtcaaagaagaacactcagctaaagaagagcatggagatcatgaagagactgagcctttgacgtcactgaacatttccaaagaagaaccttcattagaacacagtgataaagactccttgaagataacagagactcgtaatacttcaaatggatcaccagaactaaagcactctgcttctgtagaatcttttgtaagcattagcagtgacatagagggcgaaagtcttgttgaagtattgaagcaacaactagagcatggcaggaaatccctaagagatttgaataaagaattcgaggaagaaagaaatgcctcagccattgctaccaaccaagcaatggcgatgattacgcggttgcaggaggagaaagcagctctccatatggaagctttacaatacctgagaatgatggatgagcaagcagagcacgacatggatgcacttgagagagcaaacgatgtcttggctgatagggagaaggagatacaagatcttgagatggagttagaatattatagagtaaaatatccagatgagccaagagaagaaattctcgctagcatggggattctcggtaatacagaagaaacaaatgtcacctcaccaactgatgagaccagcattaaggattcaacagacaccaaacttaccggttctccatcagcggaaaattgagaaagaatacacatttcagaaatgatatcaaaacgctggaagaagaatacccaagagagctccccaaggcctgagagaactttagtcttgatggtcacatgagaccatacagaataatctgcagaggcataaagatattctaccagcattcattgcagaagcatatggtgaagaaagcaattcccaacatggaaagtgattctttcgagcgtagtactcacatgaagggcaagaacgagtggactgctttagagaatgagattccagtggtagagaaacatttagagtcacaaaaggagagcttgtgtttgtaataataggaaaaatgaaaaggagtagagttagttgaagagatagcttgggagctgcagaagtcatttatttgaaaactaaaaattccatgttaggaagataaacagaagccttcatttatttgtttttttttagttgctttatttgtgtggctaccttattttttttggagaacacaccaatcatctcattaaaacttcaagatttcaggaacaacacataactgaactttcaaagttttattaccataagcttaatcgaaatgatattatcctttcctacactacaagaaatctaattgttacaggacagggtaaaaagacaaatcacattgataagtaccttaggatcaccgctttcttcaactcgcttcttgaagctttatagtagcatcaaagctgaaactttcacctggttcaaatgtttcttcaagatcttcatagctttgcacaacagtcaactctttgccaaccttaaggtcttcctacaaagcatcaacaaccaaaatcaaaccattttaaactccagctacaaaagatgatttactcactgaagacaatcaaactaaggctgttgccaataattctaattctagtagctaaatctgactcaaatagaatctgctgagaagcataagcttatgaaatacctgtttaacatagtcttcgatagcagaattgattaatttctttatcacctgcttatagactttagaatatccaaggatctctaacaaaacatctttgggtatctgcaaataaaagtaaaggagaacttgagcatacgccaaataacaactcaatgtaagtgcttaagtgagtttgccagcatataatatcactgcaagaactctgaatctgagagtatcactaaagtgtatcaaatgatcttttacagataagtccaatctcgtcaaataaaaacacatgctccattgccaaaccacttgatggttaaattattttaccataatgctaaaataatggattctctaaaatacactgaagtaaaaacttacatttggggtctttcctgtagttccaaagttgataagaagatgtagaagaggaaaagaaacgaaaacagcaatgggaaaaacattagagaagcaatcaaatgaattcagctactagtcatcagcaacaaatcatactaactacaagagatttccagaaccttatgctacctatcaacattgtttacaagggtaacttgaatgtccaccctatttagtcaaatctttctaaagcaataacgaaattacaaagtgcagagagttgaaggaaacctgcaatctaactctaaaaagaataaaacaattttgtccctcggagaaaacactaatacatagcttcccatagcttatacagtatttgtgaagtcatacctcctttaactcttcggaaccccgggattggctgagctgcagcaaccattttctcaaaaacatgattgaatacagtttgagtcttctctcctgacacttgtacatgcacctgctcaagccaatagagaacataagatggaaaagcaacaaagtcatcataattagatcatttcaccagtatgatgtttctttggcgcagaaacaacggcataccttaacctcattgctggtttcagtctccactttcgtaatcaaaacagattcatccttggaagaagtctctacatctgcaaagagaaacacatgttcacaaaaaaaaaaaaaaaaagctaaaacaacaaaaaagaagaggatataattataaagcgtgaacctgatggtgcagcacaaaccgcgacaaactgtctattcgttgctctgtaaagagtaaagaagaaaacatcaatgatcatccaaagggagaaactagacactccagtaaacacaatcaatggtttctcagtgtagtcataagactttaaatattgctcatgattcaagcaaaaattcagaagttattgatacctagttctcggtaatttataccttgtacagagtttctgttgcactgaataagttggaggaagagttaaaaacgaagaaaattgaaatctgggttttggattaattgtctgcaaatcaaaacggaaaatgttggagcaaaattacagaatttgaataagagatgatactaaagaagaagaaagggcttactgtagagttaaagctacaaaacgagagactgtggatgattgtctgcattatctatagctgttggttctgtggcgccttcttgctctaatatgagattcaaaatgaattaattacgaaagtttttggtaaatacttgatttcttcgagttccagaatttgaaactccacaggaggaattcgcggggaattcgtacagaacagtcattgcatcgagagtaaaatcgataggagatgaagagagatataaccttgtgtaggagtataaagagaaacgcggaggacggagagagtcggagatgaaacgaagaagcagatagagtgaagaagaacgatggttctatcctataagtatatgcatatttacgattttaactctactttactcaaaaactcaaaaactcaaaaacattcactgactccaaaaaacaataacaagaaataaattgtaaaaaaatacactaatttgagatcattcataatttgaaggaatacccaaaaaaaaatttacccaatttgtttgatatcaaaatcttcaattgctattttttttttatgagttacgatattttcaatagtgacatatactgaaatttctcaaaattatacttaattaaataactatgcttgattccatttttttaggtttcttcttcatagtttaattttgaatttaaggtttgtgagtctcatcagatatctgaaaaatagaactacaggctttagaaggttcattggttttgttttgtcaagggtctctcagaggccaacaagcttcggtcattgatcttcaggcgaaaatgaataaaaccaaacgcattaacaaacagaagcagagatgccactatacatgaagattgagaagatattactactacataacacttgccctattgtcatacatctacacaagagaaaattgagcttaccattgttttatccaaagtcctcactgactaccaaaaacaaaaccctcctaaacctctttttaatgtctcacaacaacaacatacagaagaaataccaaaacaatgagacgcaacgctccaaccccaccattgcaaaaccctgcaattacgagttgaaaatgcaagtctttgagttctgttcatgagactagagattacattgcaacgaaactaggcttaccgtgatttttaatagtctgggatgttggcaaggcaggtaatgacatctctgcatatttaaaataaaattgaataagataaagcaaaactttttttgcaatttaaactttttagttttctggaagctccaacaatgagtaagaagagaacaggtagagagagaagtgattaccaggagcacatagagacaaagaagacattgacgatgaagatggccatggagcagcaatgttgtctgtcaaatcacatgtaaagctgtagcctgatgtgttatcaaatatcaagtctgcaggatagcttctcagaagacaacctataatcacattgttacccaaaaaagatcattaacactttttaacttattctggcgagacaacaacacatatcaaacaactttggaatatgagatgaattgatgcaaaccttgttgcattccatatgctgcttatcgtccaaggcatacccagaaacagaaaaagagagctaatgtcaggaagatattcaataaacggtagaggaaatgatgatacagttattaaggagtctaaaacaaaacttaccttggacactgaaatctttgagatcgacatcacaaagctcatagatatttgtcataacaccacctttccttaacatagaaccgatgactgttgcacagactatggcctgcttgtttgttattagcatttggttctgtatcccagaaatgtatgcattcaacgagctacagcaggaagggcttggagcagccacattacggcaagccttgatcacttccgttggctccttaaattccaacgggcaagctgttacacaaatgtacagtcagaataatttccaagactatccaagggagattgatgcgagagataatatgatacagctaagtacctttgttaactttgcaggacgataaaattctaaatgcagcgtttgctttgtctgcgggaagcttcctggaaagatatgaaaacaccacatttttgcagtcgttaattgcgttgacgttatttgatcctgctaaagggatcttatcaccaactgtcatttggtgtcccgaaataattagcgcagcttccataattgcaggttggcaaattggcctacaacactccttcagaggatcaactgtgcgacaggcatccagtaatttgctactgttaacaactttctcgaacgttgtgacatctgttactggacaggaacctccagttagatttgacgatgttacagagcaaagtgcaggtattgtcatgttggctcttctgctgaccaggatgctaacgatatctgaaaaacaatctgtagcaactgcatcaggcagaaccaacttattcgacttcacgttgtgctgtccttggaatatatgaagtaagctaacaaactgcggacaacatatcacgttcccaacaagtgcagcgaatggttgggaacaatcagaagctgcggtatcgataacacttgaaattgcttgaaagtctgtaggacatttgccagttaacttgggctcatatgtatcaggaaaagtagggtacattggtggtgtccaaggtagagcaggggatgcatatttggggattacggacggtgatacttgaatgggaccagatactccaataccaggtggatttgccaattcagaggttgtggatctgctactatgctcattaagcttatcatgcgcagctacatcttggaagcttgataaccagataataaataacaagaagcgataaaccaagcagcctgataagagaagaaagtaacacatcaacaaacagctttatatattttcgtattccaggaaatcatttatgaaaccacgttattgcgatcacagagttggaatttagttagaagaatgtctctccaagaaacaagaacttttcttatgagcgaaacctgaatgtgtaatgctgttgcttggggaaaacattgctaacataaaactattaaactcattccaacaagtctataaacataattcatcattgcagtgaactatggaaacccaaaaacagagcgtgaaactactctcatgattctcgttagccgcaaaaaaacataggcttcaactcatttgtatccaccatacaaattagaattcaaactcaacatgcaagaaaactaaacttacccttaagccaacaaacagtctctaaagagcccatagctaactctccccggggcattatttagtttcatcaaaggcacatacgatagtcagataaaatccatgaccagcaccaaggctggcaaaaacacctctacaacaaccttcagaagaaaagaacaaacccaaaagtagttagtaacctttccaatgaacccattcgagagaatgaggctaatggacatttacaagtatggtagatgcagaaaaaggaagttagatagtttagtgaaatgttctttgttataaaagagctctattttcttgccaaccacatcactctatacctcttatcattgaatccaacgaacatttgggtctttttaagtattattccaactagtaaagaatccaacccccacataaaaaaagaatctattaaatctttgtgttcttccaccaaatatttttggcatctaacaaccatttgctttttttgtattcaagatcctaatttattcggatccaacaaaaagttcaaaatttctgttttacccagaaatcagagtcaatacccaattctcaaacactcacaaattctcccaaaaacaattactaagctcaaatgaaaacgcagaggctacgattaaacattcatgtaaatttctcgaattagaactggttgcaacacttttcaagcactaatacgagaaagcgatatctataagaacaaggaacaagtgaagctacctgaagcctttatcatcctcgaaaatcaaaccattttctctgagcaaaaaggtagtagagagctttatcccagtagaaattgacgaaaccagaagtgtcagcttctcttcgtcggagacaatcgaaactcgattatacggtgatggagaagagcgttatagcagaagaagaagactgagagatgaaccacacaaaagggaaagcaaaaaggaaactcgagagacttgttactttacctttctctcttaacccttccttcactgtgttttttttttcttatttccttaaaacacctttttcattttaccgtaattaggcatgggcttaaaaaaagtgatgactcatcatcatcatcatcatcatcatcatattcattataatctgtcgatatttttcttttacttgaatggaaaatttgctatattagtgacattactgctcaagcttctataacgttacataactaataatttactagaaataatattccttatcaaaaataatcataccacccaaagttaataataaaagatgcaaataatcgaccaaattttttgattgatgttgactttaaaatatatattattatgcttaggaatccaagacaaaagacatcatctttagtagtagatttgttgacaacgttgcttatgtccacattctgtgttttgaattttgaggttaattaatcattaatattgttttatctatctaacacataaacaaaagaacctattattactcgcccaaaagagtcgggtcggatcgggttgagctggattggcatggataatacattcaagagttatccatttcagagctctctatgtctccccaaatttcatgaattcccaaaaaaaaaaaaatattgagagagccaaattagtgaaagctacaaatattacaaacacacaaactggtgacagattcaacaagtgaaaccatacataaactaataacaattaacaagacaagaatgttagcatttaccataacccaaaacaaaacgaaagctgatttagacaacaagaagaagaagataatataacaaagggaaaaacagcagcaagcaccatggaggaaaagtcatttcagctagccaaatggtttggggaattattgaacatactatgccacatgtaagctcttgacaaaaccatttcgagctcttggtctgaccagttatgtgtcggaaggtgttgcaggaacattaccatttcttgaaaatctagcttcttcagctcatcagaccactgcattgtttacagaaacaacttgtatttgattctcgtggtttatagaagaaaacattttcaagaccaacgcaagttatattcgattcagtgtttgcttaccgtcaagagaaagctagcatatatatacaccaggaagtctggcaacgcatctccttcagcaagataagtgtcccatagtcgattgatgagattgaatgggatctagaaaagttcaaaggtttgtcagtttcacaattaaaaactgcgactaaaccggatttaagaaaccatggcatactggcatatattcgtaggagttcaaagtgatgtttaacctcacgaatcagaagacaattataccaccggaaagcaaattgaagaaactctagcccatgctcttccatgtgtcttgaaacaggttctagtatataacaaggcagatgaagatgtgacaatgttaactctatattataaaacaataatcaggcctaaaatggaaaataggtggttggttaattatgaattaatgcactaagaaatgcagtacaatagcatcaatcatcatgacaagttgattagcatcccttgttcttatcactttatgacatcaactcatcaaaatgtcgtatataagcaaaagcgtgactacattaaaaccaaacttaacacaagtacacaaccattgttaaagacacaaacttcaaatttccttaaaatgcagaagatgtaaattaaggacttcatggtaaacaagttgaaaatcggactcaatataattaacatgattctgtaaggagaggacgtgcatgtcataagctcaaacaatcaccaaagacacatccaattaacaggaacaagctagcaagaacctaccatcgatacgcctgaccagttccttcagcttaaacacaagtctctggattccaggttgagcaaacgtgtaatgatcttgcataccgtcaaggagctttgttaagcaccagtagcaatccgcttctacatctgagactttttcagcagatagatcatccattgaccaactgtctacaccgccatctagatattctgacaagaaaatcactaggaagggcgtgaccaggtcatttattccctgaacatatccgcttgctggatgtctaatggccctgcaaactcagaaaattcaatttttagatttagatttcaactgaattatccaacgggttgttggttgacccaatgcattctgtaactcaccacgtgtaaagaatacgctccagtgatttctgcacctgttcttgctgaaagaaactgacatctggtacagtcctcggacagtcaacagcaatctgagaaagaattaatttgctaagagatttaccaacttttgaataattggttatagaagcactgagactacaagataaacctggcgaagcatattgatctcatcatcagaacgttcggaatctggaaggtcataaaattggccaacagattccagatattcaagacgttttcttctcagaacagcctcccttctatctgaattaggtggtgcatatccctgttgtcagtttatatttaaattcaaatagacataacaaaccaaaatccaaaatagttgccgtgttgatggaaagagctaataacacaaatcatctgactagtgcaagtgtgccctcattctgactctaaataatctaaacagctatctatggaagatattataatgatcagcattataaatgtacataataaggataaatggattacaagtcaaataaacataagtttaacattggatatgcttagatatgaaagtcctagagcgtaccaagagaagccgccagacatcaggccgcatatagtgtggtacaccattccatgctagctcgcgcagtttctctgcaggaattgaagaggaatttccatagtaaccaattaacagaatatatgagaagatcaaaatggagtctttcattaagctatgtctggcaagtgatatcattcccataggattctcactatcgaaacagattccgggtaaacaaaacactacaacaaaggcaaagaagtgtacctaatatgacagttgtttctgaaagcactttgttgaacttcataactctagcagagtcacttgatcgaacacctatcttcaagttttgaacttctttcacactcctttcagcactagagtttgatcgtagcttaccagcatatgtattatcatgtttcttgcttgaattgtgatcctccacctgcatcatcactcttaatttcactttcccttgatacataaagaacaagagaataactcaaagtcatttccacaactactatacctcaacaggactttcgaatagctcatttcttccggcgtcattctcagataagctccgttgatatgttggagagattgggtatggaggaggatctgatctcctagtcaacaataccttaccaggaatacttctacctttaagaaacctaaacaaaaacaagcaaaaagtcgagacaatcaaatctgaaaccctgctaataaatttcgtgattcacaagtagcataacgaagttacagatctaagaagacattgaaatcagatataagaaatgcacgatccgggaggtgattgactcattacccttggacgttcttgagtgtttgattgaatctagaatcgtcgcgcttttgttgttcgtcttctctcttctccatggtttctgtttctgtttcagttctgatttccgatgttccacaacagagcttcttgcccagaagtgaaagaagatagttttgattgagaaatgagagaatttcgggttcgattgctttccatcgatttcaaggtctaaactctaaagtaaaaaagcgacgaaaagtaattaaaatccatctggagcaaaatttgattttgtaatcgcaaatgatgcatttaggcgttaatctaaatcactccttgaatttgtattggttctcttcggtaataaagtagttttcaaggcaactttgtttgatatagtttgggcataaaaaatgtttaccagtcataaacactactcaacacaacaaatgaacgaagtatatgattactcttttcttttacaggatttttttaattagaaaatactcaaatagcctgaaaaaacaaattattagtgtaggttaagctatacattgactttctctcttattgtcgaagatcgttaatctatcacagagggaaagaatgatcaaacgaatctattttgcataaatggcttcttattcatatattagtcagactatgttttctcttgtttaccgaaatcaactgttcaaatgcggcaatcaaggcaatgagatgggtctctctgcgtccatgcgctcgatcactcttctagcttcttcttctgttgctggaaccacatttcttattttcaatccatctttcatggcctcaggtctcacactgaaggtgaagtaaaacctgttggagacctaccaacccaaaaattacatctcaataaattccttcacagcttaaacatgtattgtgcatagttcaatcaatatattcttatctgtgtacacttacttcgctggatctgagctctggacttgtaacatgagctacaacctcgatgtttatcagcggttcagctgaactggttgcttctgtgtacaatacgcgtgacttgaaacgaaggaaatttccaacatccacctgcatcattagaaaacagccccttaatcgctttcttctaaagctatcatatatctcactgtcttttttcttttcacatcacaccataactagatgaagatgagaaagaaatgaactcactggtttgataaaatcgacgcgatcaacttcgagaaaacgtggtgaaaccccagcgaaggtgtaagcattggagaaagccaactcaaaagctttgcgcatcaagaagcctccaaaaattctgccatgaatatttcgttgctgtggctggcagatcaatgagttttcatgggaagtatccttaattaggatgctgttccgatctgcaagagctggcatgtccaggaatactcgtccttctgctaataactcatttagcctctctaagtccttcaacttctcatgctcttctttaccctgtgctctcttttgttttcgtagtttgttcctctcttctgcctctttccacagaaatttttcatgctcagtttctggcacgacttggttaattggagctgacttgcctgtctgagcatcccgagccacgaatgtaaagtttgcttcaagggcaaccgactcagaggagttgttggtatctgcaaaaaacagttgttagaagaaagatatagcaaatcatgagcttcttcgacatgatgacaatgattgttgttgacagaacatctcaaatacatctcacaacgcttcaaactggtattcacaactatatatatttctttatttaccaccttattcaacagttcaagcatgacctttctatttttttgagacagtgaagctcctccaaacctaacaagactcaagtgtctatcatctatatagtttacagagaaactgataccttgaatttggagtacttgtaattgcatctccatggatgatctaccaacccatgtaacagcaccaactatactaaggtcagtatctacacgaataggtcttttcatgataatcctatccactgaagcagtcaccaaaatcatcgatctcgcactgctgtcaccaccacaatgctgtttcagtaaaagcacacaaaacaaagttatattcaaatactcaggatgcaaacaaataagaaggcaagagccaaaaacaagaaccttgaaggagatggttccagcaagagcgtcaagatcttcaaccaatttaccagtacgaatctcattccaaggattcctatattgttctcgaagaacaaaatcagaagaaaacttatagagaattgacgttcggcttcgagacggagatttagccgtcaattttgactgagaagcgtcgtctccggtaggaatttcgaacatattacgacgagcttcccaaagcgcattagtcaccggagaatgatacattccaggccataagctaattggtttccgcattgaagatcctgcatcgatcgaattttgatcaggattttcatctgacggtaccgtcgaattccacatcttctgagacctcgtagccggaatccaaaatccatcaccaagtttcccgcggtttctccgtagagaatgggagagaagctttcccgctgaagatctcatggatctacgatgacggaagcagagaattggagaggtacaattttcctttatgaatcgatagaatctctcattctttccttttgcctgttctctcgttgtgagctaagtgctaatcacgctacagtgattttttgtcttggtggaaagctaaatacagatattagaaatgaatttaataaataggaatattcaaaatttgaaagtcctattgaagcacattatatttgactaacatgacttgtggcataaaaaacgtgtaataccgaactaatgttttggccaaacaaatgtactaaactagtgttattagaaaattaaaattaaaatcaagagtttttgaaagtttgtcaaaaataagtactctgttaatttaaataacaaaactgtatttgatttaatgtaacaaaaaaaaaagagaaaaaaaatctgaagatgaaatgataagttgatattatctacggattacatattgattattatttattgttttcaaatctttttgcttgggatagaatatttgatattctttgtacttcaacaaaacaccattgtaaaatcttacttattattgttttccttttccgatttgtgttgacaattgtgagagaatacaactcataagaatgacactaaataataaaatttaaaacactatactttgagtaaatctataaattttaagaatcagacctaactttaaatgtgaaaatataattatactatataatagttaggtgtaataataatttctagatttattaaaaacttattttctagaaatttaggttatatatatggttctcacaatttaattacttatgtagataactagaaaattgggggtaggttttgctttcttaactttataatttttaaaaaaaatttgatgtgcccatttgaagaggatcttcgttcggagtgattctgattatatatatgtttcttttatacataaaactttagcgtaaactcgaatagatttatcatttaggtaacgattttagttttttagtctatgtgatcttgctagtatataatctttcattcctgcctaagtagtgcctagtgaaactgtaacgttatttcaccaattatattcaaagtgatgtcgctgcaatgacaatgacaacttcatttcttaaaactttgtcctacttactgtgggtttggtctagatttgttgttagaattctgtagtgtgatcacgagttgatagaaaattgtatattttatgcatctattttcaatacttttgaatggtttcaggaggtaaaagttttggaaaatccatatttgaagaatataacaagaatgcgcaagtggatatgttgtgcgggtaaaaaaggagtttcagattcttcaaatgagaacagtaagtttcaagagatcacttaacttactgatttttctgtctatgtatgattttgatttgatgattttttgggaaaataatggattcgagtggtattgtttccttcataaatataggcttcagctttcaggctttgtataaagtatcatatttaaccacttaaaatgagttgactattttaaagcagggacgtgaaacatttgatgaatgcttttgtacgtttctaataagaaaatgtttttttttcttgtcatcacatatgtagcaaatcaaaagaatcaaaaaccacaagatcttgcaaagcctaaggagattcttcccattatagttccttccttgtcagtggatgaggttaatgaacagactgacaattttggaccaaattctctgattggtgagggatcttatggaagggtatactatgcaactctaaatgatggaaaagcagttgctttgaagaaactcgatcttgcacctgaagatgaaacaaacaccgagtttttaagccaggttatagatcttgtttcaatctcttttcccttcctttgtcttaaggaaacttgtatttacattctcttgcttctttctccttaggtttccatggtttcaagactaaagcatgagaatctcattcaactggtcggttattgtgttgatgaaaaccttcgtgttcttgcttatgagtttgcaacaatgggatcattgcacgatattctgcatggtataatgagtttctccgcccttcttattttaaaacttttttctgttttaaataactaagaggttctcggcctaggattgttttctccatgattgtgtcatgtgatgttattacaggtaggaagggagttcaagatgcactaccaggtccaacacttgactggataacaagggtgaagatagccgttgaggcagctagaggtttagaataccttcatgagaaggttcagcctcaagtaatacatagagacataagatctagcaatatacttctttttgacgactatcaagcaaaaattgctgattttaatctttcaaatcaatctcctgataatgctgctcgtttacaatctacaagagttttgggcagctttggctattactctccagagtaatcctccatagtttgtaaacttttaaattttgttgcatcgttataaaagtatgtacgagctagctaaatgtgacttgccatttgtagatatgctatgactggagagttgacacataagagtgatgtatatggttttggggttgtacttctagagctcttgacagggaggaaaccagttgaccatacaatgccgcgaggccaacaaagtcttgtaacttgggtatgttttagctactctttttccatctcaatatatatgtatcatactgtgttttaatctcatatcttataactgtgtattattcaggctacaccgaaacttagtgaagatacagtagaggagtgtgttgatccaaagctaaagggagaatattctcctaaatcagtagctaaggtacactactttcatcccagagagtatataaatatctaaaaaagggttaggatggtaacttaatagacaagaattacatgtctttggtcgttttaatcgccaaaaaatgatctaatatttatgtaatttggtaacgcagctagcagcggtggcagcattgtgtgtgcaatatgaatctaattgtagaccaaaaatgagtacagttgtgaaagctttgcaacaacttcttatagcgacaggctcaataccgcaattctaaattcgtgcgcttttaaaatactatcttatattgtttttggacaacagagttagaatcttcattcatacaaaagagacattttactttgatttggaatatatatatatatatatatatatattaaaactactaagtcttgtgcatgattaggtatataatcattgatggataaataagagatgaggttacatattcaggcttcaaattttttatatttggtgatcaaaatttaaaaaaaaattaggtgagtttggtctttttaaagctaaaaaatattgaaacacaacaaagcaaaaaaatgagtgattgatttcaattataaggtgaaaatagaaagaaaataatacaaaaatattacttttaaaaacattattaatttaagaagaaaaagggcaaatgagaaaagtggactttccttttaggctgttttaataatcgtcttccccgcggtttgcccatctgtctccgtcttcatcatcaagcaaaaaaaaaactcatctttctccactctctctctctctctctctctctctctctctctctctctctctctctctctctctctctctctctctctctctctctctctctctctctctctctctctctctctctctctctctctctctctctctctctctctctctctctctctctctctctctctctctctctctctctctctctctctctctctctctggttcatctacagagttaataatcattaagcgaagaagatccctagaaagattgatcagagaaagtctcagctgaagcacgtttttggaaaacccagatttgacgggtatatatctaatattttctttcaatttggatcaattctcttgattttctacctttatagagcttattgattcgtttccctttgacccaattttgctttctttatttagatttcaaatttcttactcgatttcgttttgtgccccatttgaggatcttcgttgtagacgcgattctcagtggttctgagtgttaattcgagtagaatctcttctgggtaacgtttctcatttgaaattcacagtaaagttttgatctttcattcttttcgtttttttcaatatccagtttatccatagtagttgactattgccaaccttatctgacggcagaattttgtccctttctgatttgtaattttgcagttcgactaatggaatgtggagttgttgattgagaattgcattttttattatgattagagaattaccaactcattgttccaaaagcttgtgcttatcatcattgctatcttgatgcaaatctgaatccagtttctggttttgactttactttgaagcttttttttttcagttatgtgaaaatgttgctgtgatttgttagatggtttcaatatgcctaaacaaatttgtacttgctagttacaatatttgaatcatgtctaggggacagttgctttacttgtttgcattttggaggtagtgatctgaagcattaacttaaattgaagtagcaggttgtgacattgtaacattagatgttaagtaatgccgctgccatggcagtgactatttcatttgttaaaattttgttctacttactttggcattgacatgtagtgtaacgagctaatagaggattgttacttttttctgcatctataatcagttgctttgaatggtttcaggtactaagaagctgtggaggatctatatttgaaagaagagaacaaggatgcgtaggtggatctgttgtggggataaaaaaggagattcagatttatcaaatgaagaggtgcatttgaaaagtccatggcaaaattctgagggtatgttgcagacccagagatcacttaacttactgatacttattgtctatgtatggttcggatttgataatctattgggaatatgattttggtggtattgtttgcgtactaaatataggcttaagctttcagagtttttataattagtatcatagtttcccacataagaattagtatttgactgttttgaaggagtgaacttgtaacatttgatgaatatctgtaatggttctaataagaatatggtatttgcatgttatcacgtatgtagcaaatcaaaagaatcaaaaaccacaagctgttgtaaagcctgaggcgcagaaagaagctcttcccatcgaagttcctcccttgtctgtggatgaggttaaagaaaagactgacaattttggatctaagtctctgattggtgagggttcttatggaagggtatattatgcaactctaaatgatgggaaagcagttgctttgaagaaactcgatgttgcacctgaagctgaaacaaacaccgagttcctgaatcaggttataaattttgcttcaatcccccttcccttcatttccttctatcttcagaaaagaaattctttacaatctcttgcttccttcttcttaggtttccatggtttcaagactaaaacatgagaatctcattcaactggttggttattgtgttgatgaaaacctccgtgttcttgcttatgagtttgcaacaatgggatcactgcacgacattctacatggtatgaggagcttccacgctcattcttgttagaaaacttccttgcttgggaaaaatatagaaaacagaatcgatttcttgatggaatgtgttactattataggtaggaagggagttcaaggagcacagccaggtccaacacttgactggttaacgagggtgaagatagctgttgaggcagctaggggtttagaataccttcatgagaaggttcagcctcctgtaatacatagagacataagatctagcaatgttctcctttttgaagactatcaagcaaaagttgcagattttaatctctcaaatcaagctcctgataatgctgctcgtcttcactctacgagagttttaggcacctttggctatcacgctccagagtaatcttccttaaacccttaaaacttttgttgcgtccaaatgaaattatgagcaaggcagctaaaatgtttctttccatttgcagatatgctatgacaggacagttaacgcagaagagtgacgtgtatagctttggggttgttcttctagagcttttgacaggaaggaaacctgtagatcatacaatgccacgcggccaacagagtcttgtaacttgggtatgtttgttatctgctcgctgtccaaatctgtatcctgctctgtttctatctcatgtcttacaaattgaagtgtgctgtctattattcaggctacaccgagactcagtgaagataaagtgaagcaatgtgttgatccaaagttaaaaggagaatatcctcctaaatcagtagccaaggtacactatgttcctcgcacaagtatctaaatatctgaacattcgataataactcaagttgcatagactaaagctacatgtcttttgacctttttagttgtaaatataatctgaagtttatgaatctgtaatgtggcaatacagctagcagcggtggcagcattatgtgtgcaatacgaatctgagtttagaccaaatatgagtatagttgtaaaagctttgcagccacttctcaaaccaccagcaccagccccagccccagtaccggaatcctgagtttgtgcaccttttaaataccagccatcttcttcgtgcaatagagttgggttctttgttcatacaaagtgagaattatactctgatttgggaaaaacatagacatgatcttactattagttttcattttggtgttaaagaagagtgcttaatatttctcatttgttatgtgaggtattggaaacaggctttttttacttgattggcgtggagaacaaacatgttttgcatttggtgtcttttttttttgttctccttttctgaatatattgacaagctctgtttaagggtttctgaatccaccatttgaaattgttattctttttaacctttacacagtcaacagagtgcgtaacaagttatgcattatattcaacgtattcaaccccatcaaagaaatatctcgttagttctctttgatgcttgcaaaaaacacaaaaacaaaaaacagttggtccatttaatatgttttcattcttgttttctttttgtccttcatgatcaagtttattaatagatcaatgatctatctaaattggacgaagccaaagatatttcaatgtgataggagaataaagatgataacaaggattggtaagatatcagtctccttccatgcaccatttgtagaacacttgtagccatgaaatatcaggtcttgtgcaatggagcgttgttcaacgttttccactgtcaatttttgcaccctgtgcatttttttcaaattgttgcttgacattccgcaatctgaaaaccctcatgaagtcatgatgtggatcggactattgtccattcattaaatattttattgttacgtgcctttaaaatcttataattacgtgtggactttttgtgtttttaaaatcttaattagaaagtacaatgtatgtttatatccttattgtctaattaatgtgttttatttgattaatattatatataaaaccaaaaaataacatatatgaaattccgtcatatttataaaagtttcataactaatttgtgaaaatgattttgtaattacatagtgatgtattttatcaactaattaaccactaatagaattttttctataaaaaaaaaacatgtttataaattgtaggatatgcttattttctaaaatgaaggattttattatatcttacaatgcttcttattaattaagtgcataacaaggtaaaagataaaaagagaaacattttaaataacggaagatggaaatgcaatgagagggaactttcggcaaacatcgagaccaaaagcttcagttagatcaggttgatccccatttggtccagcctcggccctccagtcaaatcggcctacaaggttggccactgtcacctctaccaaacccaaagcaagatttatccctggacaaatccttctccctgatccgaatgggatgaagtttaaatcttttccatgataatccaaagttgaatctaaatgtctttctggtttgaattcttctgcatccggtccccatatcgcggggtctctttggatggcccaagcattgattatcacctacacatgtttcaaatacaagtttagccaaatcattttttctatatattggaatatatgatgtagctaacgtacaccatgttttaagaatttgatttgatagaaattagtttacctcggttcctgcggctatgttatatccctttactttgacatcttcacttaataatctgggaagtattagtggaagaggaggatgcacccgaaacacctctttaatcacggctttcaagtatttcatattttcaacatctttttcttttatgtatgaaccatgtggcctaatggttgaccgaatctcgtcttggagtttcttcataacatttggatttctgatcagctccgtcattatccattctagtagagttgaacttgttgacgtccctcctataaacatatcctgatatatatatgaagtagacattttacatgtcattagtccaaaataaaaatgttgcattaatttgttagaattattaatgaattggtttataaatgatcataccaatatcatgaatttgatgtcgtctctttgagcttggaatccaatactcttctcgctttcgattgataacagtatatcgacaaagtcctctttatgattacctgcctctaaatgttcttgcaccactttgtccataagatcgctaaacccttgacttacttcctttattctagcattgaaaccgttgatcctgtctatccatgccaaagccgggacatagtccccgattgggaactcgcctaaaagctccatgatctgcctcactcgcttcttgagatcccttgcggtttcgtcctcactatgttttcttcccaaggcaattctactcgtaacatcgcttgggagagtaacaaagagttcgctcagattttctgacgaagaagaagaacttgctttctccagcttcttgatcatttcatttagctcttcttctcttatcttctcaaaggacgcaaccattttgttcgtgagcagattgagaatgcatacactcttcatccaagaccagagaaaaaaaacattattagttgattaaaggatatacaaaagtattagaattagttagttcatgtgtgggtgcaagtttccgacgaaaattttataaaaagataataaatatacatataagttagagaagaactaaagagtgctagtaatgaaataccttcatctgtctccaatattctccatagggaccaaacaccacatcacgccccccattcataagcccatgaacggcttttgatctcgggcggttggcaaacttaagatcgtgtgttttcaatacctcttgagctgcttccccggaggatactacgagtatggggacacggccaaaatgaaggagcatgagtggtccgtaccgaaggcttagggaatggagggaacggtgagggtggaggctaagctggtggaggttaccaatcaacggaagcctccatggagatggtggtaagttcactttgttggcggttcgtttgaggaattgtttaagcaagaaaagggtaatgagggtcgttaagcacaaagagaccatcaatatcatctccatttcttgaatattgctcatgtatgaaagtgtttgatttgtgatttttaactcatcttctgcatgctatttatagggtttactggaactcatcgtttttgtcaacttgcatgaatgtagcccctatttagctaaatataattatgtagtgtgattgcatctttgtatacgttgaaaagtaataatcctataattatttagtcttggcaactatatctagtccagtcttttttgacaactagtctttgcactttggtctttttgttattcatgtttaaacagttctatatgatctcacatgatagcagttataattttgatatttatttttgtttacttagaaaaataatataataactatagtttttggaattagagacgtaatctttctatttaacaactcgtattagaatattaaattcttaagtcttactaattgatatctatatatacatttttgcagccactttgtgaaataaatcctggagttgggatttatttacagcggctgccactggcatttaataattatttttgataattagaaagaaaatcttctaattaaatatttgacatttaacaatcttcccaaaatctctctaccttaactacacgattaattactaaaataaaacttccaaaatatttaatattatttaattactacaaaattatcatttttgatattgcttttctacatgattataatcatcaaaccgtagagatctttgatagcatttaattactacaaaattacaaaatatttagacaataattcataaacatatcataaataagatcaacattaataaaataaatgagttttttttagaggacgggttggcgggacgggtttggcaggacgttacttaataacaattgtaaactataaaataaaaacattttataactatatacaatttacaaacttttatatatattaatttaaaaaataaattgtacccgcggtataccgcgggttaaaatctagtataacataaacaaggtttgtgaataattaaccaccctttgtagttatgaataaaaatcatcattttttatcagattcagttttgccgcatttgataatgtagtaatattgaattggattgtacttttgtttacctagaaaatagtaatacactaagattgtataaatttgaccatttgataaaaaataaaacggaaattggagattaatggaattttgtatacattatttttaattatcactacagtttaatttataagttagttattttctgttactatagttaacgacgatgcaattaatgtcatgtgtattgtagtcgtactttgacattttgacgaaatttcataaaatattccaaacttatgtttcgtaaagacaaaaactaactcgtgtttttagaaataattttgtactgaaaattaccaaaatatcataaatagataaaacatatagaagagatgaatgaatttgatattcttattatatttaattatcactacagtttagtttataagttagttatgttctgttactataatttgcaattaatgtcatctgtattgtagttgtattttgaaatttcgaggaagttacagaaaatattccaaaattatgttccaaaactaactcgtgtttttagaatatcttttacctggaaattaccaaaatatcataaatagataaaacatatagaagagttattttttgtcaaaatgattcggatgatgacacaatatgtattccaaaatatctaagccaaatttatttttgctacgttcatgtaactttcagtcgctttcataataaaataatttgatatcaattagatgaaagatgtcacaataatatttgcaaatgcagtgttaattatgttattcaacaaatcctgcaaaaatataattactatattcttctagcgacgttattcatcaaacgttgaaaataagataaaaatatttaccgaatgatcaaacaaagagacttttttattttatttttgaaagtcatactatcgttactttgtcaaaccacgaaaatttgagattgccgtgccgtataataagggtatcatcaaagtttgactttgagtcataagttgtaattaaacttagcatgtatccatttagtatgtaattatatgtatatactaaataatttctgtatattctcaaattttgattaaggttatattgttttattacttcttttttaagggttatattgtctgattacttcaaaaaaaaaaaaagatatttcgaaatttagaaaacatatgaattagattattaaaccaatcatgtatagtataggctaatgcatgtaaccaaaccattataatttcatcgttgatttgattccatgatttttctcataaagctgctgatggaacgaattaatcttgtcaaatcatttattgcgaagacattttaatgtcatttgtgcatgtgcagcaaataccttcgcaaggctgctggtagaacaataaatattttaaaaactgactaattctcatgaatataatttcaagacgtggatataaatttacaaaacaatttgtatatgctactatatatgtcactataaacacatcatatatctcttatgtattattttgagaagtcatttgtcaaaatttgttgatgtatttctctcatgttttcttaaaaaagaatgtaactaaaaacagtattgttggtacaattttatcattagatctgaatgtatcataccaatataaacaagagaaaatataaatgtcttagggtagctaagctaactcgacacatcggcagacgaaagaacaagcagtacgaaagtcggtcaatcccttagcaaaattcaaagattattgatttgactatattttgatttttgttgttttactattcaagtttgaccaataaaaaactgttctacatttacattcgtgttttccataaactttactttttaaatgcggtttaactcttattgaaataaatattactttcataaaatactaagagaaccaccgtgcgacgtatacgtacatgctagttatttgtctattactaaaccaaaatatatttgtgaaccatctttttacttttagtagagtacatatatgttttttataatatcttataaccttgatttagaagtttgaataacccattcaataactaattaagttgtattaattagttgaataatcaaaatgttgactactcaagttaagaagcttacccgttgttagatgggtcagtcaaacttgtaatctaaagaagtcctgtaaatattctgaagaacaaattctcttcaactgtaaaagacattttggttattcgttttatgagaaggttcagtctcttttccaagactatcaagtattagtggaatttaatctctctcaaatcaagctcctgataatactattcgtctttactttataagagttgtggccttgtgggacctttggctatcacactcctaagtaattttccgtaaatcttagttttgttgcatctagatgaaaggatgaacgaggtagctaaaatgtgtcttattctatatgactcaagaaaaaaaaagaatgatgtgtatagcttctagagattttggcaaagaggaaacatgtagattatgcaatgccatgttgccaacaaattcttataatctggacatgcatattatacaccctatccaaaatccgtatcctactgtagatttatttatttcttgtcttacgatttagagtttacaccgagactcagtataaataaagtaaactacataattagagcacaaatcgggatcgcaccgaattgtttcacgttgtctctaacagaccggcagtcccgtgctgaacattccattagagcacaaatcggttaggacacataacaatttcttagtcattgaaaccgaaacaaggaaaattctcaaaaagaagggtaatgcaggaatagtgctcttgttgtaattctcaccatagactctctgttttgctcacaacctctgtttttgttcttgttaaaacagaaagtacaagaacacgtttaaacactttaatgtctacattgttaataaacttggataccttacacaacacaaagacacacatacatatactacttgacactattgcccacttgcacttagacctaatcatactcttacttagactatactcctatgttctaggcactcttacacaagcctcctacttgtgttggaactctaacaacacttgcaactactcttacctagacttgactaacttaaacaacactttactcatttgggcctaacataacaattagcccaagtacttattacaaacaacaagcccaacatctttattgacttgttcttctcctcctttgtagctggcctcttcacgacttcttcttcttcgtttcactttgctatgatcttcttctcatggattcttcttcttcttttgcagattcaatcaaggattcaataagactggaccaagatccacatacaaagataataggctagacccaacaaaaagcccacttaagagtatgcccacttttgaaggaactgagactaggaagaggaagaggagatggatcggcgctctgtcgaatattttgccgagaacaggctccaagacggcaaggtttctcgtgatagagaacgctaccaaggaggttcaccaacacattctctaacatcgatttgattctactattttaaaataaatttttgactttacacagtcaacagtttagttgaaaattaacatgaaattttagtttgcacaatcgcagaagtctagtttacgacatgaatatacaccaattgtgacgtcaatacaagctatcaccaaccttgtttatactattcttgcaaatggccatgagtacaaaagtctacgagagggctcacaaattttttaaccaaacaaagatggtggggcgacgaaaaaaatgatggaaaagaaatattttatgcaaaaatcacttatgtttctacatttaggcaatacttaattagtgtaatgaaacaaaatgagacattttcctagaaagctacgtaaaaaaaaagtttattaaattaatcctctcttcttctaattttgtcccaaccaagtcagaattcataagttcacttccaccaacaagcttctagtccaattgaatcaaaaccgagtctaaaattaaagagttattgaaccggagtcgaaccataaactaaagtaaacttttttacttggtttgccttaaacgtgattatcataaggtgatccacatgtatatttaaataagcattgactcaatgctccataagatattattcgaattatagtcgccaacatagtagaaagactatgacagaagctttagggttttatgctctaaaagtattcctccaaaagcttgttgtagagtataaaatgaggtcattattattcacactcacgtatggtaatggaacaaatctatgtagatgtcgtatatagagatagagagcaagaaggcgcatggcaaggtaacgtaagagtgtgcatgaactgttcccaccacgtgtgaaacgtgagttgcgactaacttccatgaggttggctcacgtgcgggctatgacgtgccacgttgtacaaatttgtggtcataaccgttgccatgtcacacttgcattctctttgcttttcacaaagggcaaaaaaaccaaaagactttgtagatagagtcatagagagaaacaaaaggaatattttttttttctttttggtatttcacttgtcgttttatgtatctaagagcatcctcaatggtagtttttaaacctaagtcttttaatcaaaattaaagtataaatatagataaataatattttttattatggatctcttaaatttagtgaaaccaaaaccaattatctcttaactaagagataatttgcctaggtttcatcaaagttaagagacttatgaatatttaaatcatataatttgtttattctttgttaagaaacttgtttaaaaccccccattaaagatgctctaattaagcatgttgattatcaattcaatgtggtacctttgattatgcataaaactatgtatcttcttctttttttttggatttgagaggaaaacatgcatgtgtgtttatacatacatatagacgcacattgacgtcatatcaagaaaaattaagtcaagtgtaaaatgtaagaaaaagtaatataattttaagagtattgagtcaattttcgttcaactccatgacacaatggttttgaccttatagatttattttttcttaaaagaaaatatattactgcagatctgatgataaatttctaaaccgtaaactttatacattttcatttcatagctcgagactgtaaatagagtatatatatagtctatacaatagctatcagattttttcttttaagttcctgatttattcatactttttcatataacgattcctaaacttagattcaacatcactgagaacttcacgtgagaataaatatttattttcttttctcactatataaataattattttctacaacttttaatattaaccttacaaaaaagcgtgtgctgttgattattcttgagaatctaggtatacctgaaaatgctataaattcagaggcagtacatgagctctataactgcaaccaacaccaaaaatcttctactaaatcagaaacacacaaaaccctagttaaaaatggcagtggtgagtcacaacaacgcagaaggcaggctatacgaatcaactcagacttggccaattgcttacttacaaattggtggccaagagaacggaggagacgatgacgacgatgactgtgacgttgcaccggcggcttgatcatttgcatattatcgtatgctactataaacttaaaataacagtcatttaattaagtagtaattgtgcttcttgacatagaaccacacacacacatgtagctgaagttgtagatcgtgcctgtatttatccatgtcgcaaacaggcttttattactagataaacaacatttttgactttcgagtgttgagagactagctagctttaagtaacaatataatgtatcgtgtgactatattaatgaaataatattacattatgtacccaagatttgtggttatagtatgatcaacactatataattctcatatccatttatctttcttttggcttttttgttttcctttttcgaattatattagctggaaattttaaattttgtacagacacattgtttgttctcatcttcctttgctcagccttttgtggtctctaccgcttaggaccacttactgcaaatctagaaaattaaaatatatgactagctaaaatgtgaggtatattgagaagtgagttcttaaaactacttggacttgtctacttagaatttgagacattataagtacaattgatgttaatctaaaagtgtagaacattgttaatttcttgaacagctgttagccaacaatgacggacgatacgatcattgatcgaagaggcgattttgtttcacatcgatcagtggatctcttggcgaagtacatgaccaaccaccagatgatcagaagcattcaacacctctctatttatcccaatttgtaagtacatatatgtatgatagtatgtatgtatgtatatattatgagtacatatacattagaaaatactattaactttcaagtcgttatagtaatggacaatattattcgtaattatcaaaagcgctttttcattttctatctgaacctaatgcctagcgagttgaaaacatagctacctaataggctactactacacaatcttgaagcacaaataatacaacgaaacgtcccttgggtatgagattatttagaagtttcataagattctagtccttattcaattgtgcccatcaagcacaaagtacggaagcgataggaaggacgtcacagtcctgttttgataatctaatgatcgtagaaagcgttgggtgcttttaagttttttctttcgcctaaatattttaaggtcttttgtcaggaatagaaatatgataaagtctattgagtttgtaagacctatgtatattgggtccggatgcaatgcttttttactcatgcgcattcaatagaagaatttgttatcagtgaacgagtacaatgtcaatatatttaacaaattatttaaaaccttttaaatatgtgcatagttttttttcgtactcggatagaaattaataataacaaaaattactgatttgataaaatgaatttcgctttgtaaataaattatatataattcaaaatcctcatcgtcgaaaacaattttaaaataaaacaaccaaagatattttccacaaattaaattaattttagttttgaattcagatatataacaaacaatgatatataagaaatatttcattaaataaaaagatattcttaactgaatttatttattaatttggatatacttattaccgaaataaaggattgtttatttcttacaactcgtcttattagtgttgcatagcataacaaggtgaaagagaaaacatgttacacaaccgaagatggaaatgcaatgagagggaatttgcggcaaacatcgataccaatggcttcagttagatcaggttgatccccatttggtccagcctctaccctccagtcaaatcggcctacaaggttggccactgtcacctctgccagacccaaagcaagatttatcccggggcatatccttctccctgatccgaatgggatgtagttcagattttttccgtgataatctaaacctgaatctaagtgtctctccggtttgaattcttcagcatccggtccccatatcgcagtgtctcgttggatcgcccaagcattgattatcacctagacatggttccaatacaatttaaccgaaatcattagctatgtatgtatcaacaggatggtaaataatttttaagatttatagctaatacccttttttaagtaaccaaatttggcaaacatatttttttactgtataaccatgactaattaagaggtatatatgtaaagttatgtgtgaactgctagggtaaattcttgcaaatgataattaaccgtgataaaaataattttgaaattatttatggtgtttctttgcatataagaatttaatttgataagaataagtttacctctgtccctgcggctatgttatatccctttactttgacatcttcacttaagagtctgggaagtatcattggaagagaaggatgcaaccgaagcacctctttaatcacggcttttaagtatttcatattttccacttctttttcttttatgtatgaaccatgtggcctaatagttgaccgaatctcgtcttggagtttcttcatactctttggacttctgatcagttccgtcatcgtccattctagtagagtcgaagttgttgacgttcctccgataaacatatcctgatatgaagtagaaaagttacatgtcattactcatagaaatatttcatatgtgaccatatattataaatgaattggcttataatgatcttaccaagatcataaattttatgtcgtttctttgaacttggaatccactgttcttatctttttcgattgataacaatatatccacgaaatccgctttatcgttactcgcctctaaatgttcttgcaccactttgtccataagatcgctaaaccctcgactcacttccttaattttattattgaaaccacggatcccatctatccatgccaatatggggacatattccccgatcgggaactcgcctaaaagctccatgatctgcctcactcgcttcttgagatcccttgcggtctcgtcctcgctatgttttcttcccaacgcaactctactcgtaacatcgcttggtagagttataaagagttcgctcagattttctgatgaagaagaagaacttgctttctccagcttctcgatcattgcatttacctcgtcttctcttaccttctcaaaggattcaaccattttgttggtgagcagattgagaatgcatacactcttcatccaaaaccagagaaaaaacgttattagttgattaaagaatataataagttaaatatgaaaacatattagaatttcttagtgcatgtgtgggtgcaagttttcgatcgacgaaaacaaaataataagttaaataggaaaaaatagtcttaaaaataaaagataaaagagaaatttgaaaaggctagtgaaataccttcatctgtctccagtattctccatagggagcaaacacaacatcacgtccaccattcataagcccatgaacggcttttgatctcgggcggttcgcaaatttatgatcatgtgttttcaatacctcttgagctgcttcaccggaggagactacgagtatagggacacggccaaaatgaaggagcatgagtggtccgtacctgagactgagggaccggagggaacggtgaggatggaggctcagctggtggaggtttccgatcaccggaagcctccatggagatggtggtaggttcactttagtggcggttcgtttgaggaatcgcctcagcaagagaagggttatgagggtcgttaagcacaaagagatactcaatatcatttccatttcttgaatattgctcatgtaagaaagtgtttgattggtgatttttaactcatattctgcatgctatttatagggttaattggaagagtttattagcgacagttttggaacccatcgttttctgtcaatagtgcaggacgtcaattttattcgttgtttgtgtactttgaaaagtaataatccgatcctatatggttagttttggaaatatatcttgtttttttttcttttaagtcgttattatatattgatttttcttcataaaaatacacagtatagtatatccaaaaaaaaacacttccattaactatgaccacgaacatcattttagccgacctatgatagtagttatatttttgattctattttgtgtactaagaaaagtaatatcctaaatttattttttggaattaaacgtaatctttctttttaagaactagaattcaaatattgaataataattatactaataaatatcaatagttatacaagttaaagaagagttgaaaaataactattgatatgaataataaactattattagccaaatttaattagttttgctagctactttcttgttgtaagcttttattctctttcataaaaagttacttataactttaatttaatttgatatcagagaagtcacaacaatctttgtaaatatagtgtaaactactttaactcagtaaatcctgcaaaagtttgttatataattcgtacataagtcttaagatcgacgttttcttatatatatataaaaagaacgacgtgattcatcaaacgtttgaagtgagaaagaataaaataaagtttttttttttttttcaaacctcgaaagaattacatacattgccgtgacgtattaagggtatatagaagttttgagtgcatacgtaatattgatatatatatccatgtcgtatgtatatctagtgatgtatagaagtttattcgtaagactagtgatgatgaacttagaaggattcaaagtaaaatcgatgtatatccatgacttgtgtacatcttaacatatattaccgttaaaataagcttgttttattctaaaatatataacgtttcagaaaaattgtctatttagtaattgcatttctcaaattttatcaaatgtgtattgtcttattacttactaaaagtattttttcaaatttttgaaaacaagggttagtttttgtaattaaagctaatttcagattcttaaatgtttcactattttttatattatttcataaagataatagaagcaaataatttggaaaaaactttttttttgcaattctaacaatattttactggataaactagattttatcccgcgatacaccgtgaaacgattttttttttaagttagtatatataaaagtttgcaaattgtatttttttctaaactatttatattttataatttacaattgttattaagtaatattctgtcaaatttgtcccgttaaaaaacttatttcttttattaatgttaatattaattatgatatgattttgaataattgtctaaattttttactttatatatatgatattaaacccacatattttttgttaatcggagtaatatatgtctgtttttaaaatatttaaaattacaatatgatttaaaatatttaaaaatcaaacaagtatattcatagttttaaattttaaccaaattttagaaatatttatattttaaatataaaaatattcggtgtaaaagtttttgaaaacggatttaaaatcaaattttgtttgaatagacctatcaaaaaatttaatagataaaaattattaaataaacgaatatcaaattgatctaaatacattttgacctactgggttgaaaaaatattatatagataactatgttttgcctttcatatacagtatattatatatattttgtcaaaattttcttttatagtttagatgtgtattgacatgtgttgtccagtcctcgtgtagaacaggaaggcatcgtatgattttttggttccaccgaaaaaattaataaggcatgacggacctgatccaacacaattcataaaacatttccccaaataatcttttatttctgtcaaacatttgatttttcttccaggacttttctatgtaaaagtgcgtgcaaccaattatcttgtcctcactgattccctattaatgatttttctcacatagctccttatgcaatgaatctatcttcttaaattgttgcagccacatttttaagtcattcatttgtagctgagaaattctcatgaatagaattcatcacgtggttattaattcacaaagaaaaaaaaatgtgacaactactatatatatgtgtcatttataaacacataatatccctttaacgtaaaatactaggagaacccctgtcctacatgctggttatatgacttatttgtctattaacaaaccaaattaacacttttgattcaaaatgtgtttgatccaaattcatctttgaattatattatttgccatgtagatggttttcttttgtaaaagacctaaaacgtgtatccgtataataatatgattttaatatattatgtttttagaatatatgatgacttttacttttccaaacatacgatgacttttatttggaagtttgacttacccattcaacaacgaagttactttagttaaaataatcaaagtgtcgactactgaagttaagtaagttacccggccggtcttacttagctgttgaatgcgacccgatataatgttacttagttgttgaatgagtcagccaaacttcaaaaatctcaaattcctcacaactacaaatagctagctcatgtattttcatatattctacaaaaaaaaaaaatcttaatttaaattgtaaatgaaaattttgattattcgtttacttattcaatttggaaaattttctgttttaacagtagagttgttttaagatttactaagaaatttggtgaatgaagtattcgactgttacactaaccttgggaggattagtagagcgataaaatttgtatcaccctctgattataaaaataaaggaaaaaattatatgttaccaattacaatgaaaattttaaatatcaaaaagtcagatatatgaatcttattattactaacatgtttgagtaattgagtttagttttatatcttcctataacgtaagaatcttttgtatatatgtagttatttcaaaaatagtactggaagttttggatattttctgctagcagtaaaattcaaaatttgaaatgcctacatctgttaagtgttgaaaaaagtaattttaatttcactattttattttacatatgcatattctaaaacagaaacacttttccatcatgggatcggaggtgatatatataggttttaatctgcgagactatttcttactataatgttaagattaccgttggttgctattttgtacgcccttaatccagttttatatgtaaatgtcctttgtaatataaaagaattatctttgttttgagtcaaagtattttttttttctttttggggtaaccacgtcaaagtatttatcgagtttttacaaatttttgaatagaaacaagatgttttggaatatttatatatatatatatattataatgcataatggtgtataagcgccaaaagtttagcatccgttgaaattgttggtagcatttttttgctgttttcggacaaaaataaatgttagctttttagtcggcaccggtttgaagtgacgagtagtaaattaaatccatttagtgccaaattaagcaggtggtggaggtgtgtcacaacacatggtctattgttgttttttctctctaaaaaatatgagaagaaaatctctttttttttcaactcagagacctcgcgagcccacgttgacgtagacacattttggtgtgcgcaagaacataaaatcttaataatattcaacaacgttgaatatggaaacactggaaagagacaaattcaaattttgctaagcacaatattagggttgtgaccgtgaacccaacgaatatataaacataaaacatggttactggagagcctcccaataagagagaaagtagaaagtgaggttcaaaaactaaggcattttagagttgcataaatgtaatcagtaaaaaaaactatataatcagtaatccaattagctaaaacttgtaaaaatttataaaatcgtaaatttaccgagtcttacatttaatatgattaaattattttatatcaaaaaccatatttaccaataaaatataggttctctaaagtctaaaatacataggaaaaatgcaatttaattttaaaattgtgaatgggtaaaccgtaaaccaagtacaattagcatacggtttgatgcaccggtctacttaaccgaagtttaaggcctcaggcccattatcactcttcttcttcttctcctcctaagtacttaccataaaccctaattttggggtctctgcacaatttgcagatcctcagatccgattctgtctattagtagtaatccccggagcttcagctccaaggaaattcgtaattcatggcatcaaattttgtgaaactcggcagtcaatttatcggcaaactcacccgagtaactagcttaccagctcatcacactgatttggtccaaagagtttcgattttaaaagacgagcttttaacgattggtaacagtaaggagaagttccaaaatgttttggatcagaaagggcaatggttgtttagaacttatcgtgatggtgctgggatcttagagcttatggatcaactctttcctcgtcattacttagctcttcaggtttcctttcttcttctatcttttgaattctataaagtttgactcttgccactgccctgatcttttgtagtctataaagtttgaatctttattagcatcactgtagattagttgagtttgtttcgtaggtttttgatgttatgttaatgtttaggttttagagtggaggagaggacaaaaggattattgtatccccttgacatcggaggagtatgctaaaggaatcaaaattgcgggtagagctagggatattaaccttgcagtctatcttttcgatgaggcggctaagaaacgaatgcagactgcttcagtttataattctttgatgagtgtttacatgtggaacgggcttgctgaggaatgtcagtcgctttttaaagatttcaggaggcaaacgcattgtgcgccgaccgttgtgacatataatattctagtatctgtttatggtcgacttttgatggtaaagaatatggaagcagcttttgaagagttacaaaaagtgaagcttcctcctaattctgtcacttacaactttctaattgcgggttacatgactgcctggaattgggataaaatggaagctacttttcaagaaatgaagaggggtccagttgagcctgacacagatacttatcagctaatgcttcgtgggtatgcaaattctgggaatttgaataggatggaagaaatgtatgaagtgattaaagatcaggttggtgtaaacagtggtcctttggtcagagctatgatctgtgcatattgtaagaaagctgttgaggatagagtccaaaagattgaaaatttattgagtcttctctctggggaggaatatcttccttggttgaatgtgcttttgattcgactatatgctcaagaagactttgtggaagcaatggagagtaaaatcaacgaggcatttgagcagaagacatgtgttaataagtcaagtatcatgcgagcaatcattgcagcttacttcaggtgtaatgaagttgacaatcttgctaatttcgtcaagcgtgctgagtctgctgggtggaaactatgcagatctctctaccactgtaagatcatgatgtatggatcccaaaaacgctttgaagaaatggaaggtgttgtaaatgagatggcagagaccaattatgggcttgtaactaaaacgttcgccattatgattaaagcttataaaaaccatggaatggagtcagatgctgagaaagtgaagggaaagatgctgaaacgtgggctttagatgcacttcagtttgcacaaagaattctgttgtttcgatttgttcagtgtctttatcaagtgtgaactctggccaaactgagtatcaaatggttagtgctgtttctgcgttttcacaagtctcctgtttatagtgacttaccagggagttgtgcttagctttggtctccctttttagcaatcaggttgtagaactgtcccccatgaggctgaataaaagatgctggatatgcttccataatccgtcattaggggttttgggataagactagtccacagttcttttccgtcatgagtgactcaaccatcactagtctgccatagttgtacatgttacaggcagggtttgaaatttccatggcagattttgatcctgttggcagatgagaaacctcggtaaaacaaattctctgtgatccatgaagaacagtgcctgctctatctggacgtcttacctgtgtttgccgatacgattagaagagctatgattttcttcctatttgatggctctgccaagtgaagttatttccttgaagagaaacctgaccgatgttgcagcgggtttctctttctgccacccctgggttaaatttccagattgtcgtaacttaatttttgttgttgttaggctatcacagtcttacatccacatactgctctgttgtttaggcttgagccctgtttgtaaatttgaggaaaacagatagctcagctacacatgatgtttcagtatagtgagacgtcactgggatctcagttactaaatttacaagttctcacgaataagccatggatcttttaattttatcaagatttttgtttccttgtcatttcaattctttgcagtactttaacgatcagagaaagataaacaatagttatagatatcaaatgattgttttcttttcttgatccattatttatacaatggacaatgaggaagaagacaacagataacagagcgttccattaatgtttatgattcatatcaagcaacactgaaggacgtagcagcattctcaacgaacttcctagctcctttgaaccacctcttgtctcctgcttgagctttgcaaatgtaaagctttccaccattcacagtggctgttatcagttggtgcttcccaccttcatctccatcagctgttcttgtcagaaccgacaagtaatagtattctttccctccgatttcttgtgtagatgtttccaaaatgtttgcagttgctactgcatttgcatcaaaccctccctgcaaaaatgatcagtcacactctttaaggtattggttcttgtttgaacccaaaaactccttcaccaactagaaaaggaaattacctcagaggctgtttcgccgacgtaagcttgcttcccgaggagataattcacctgcagaaaccagaaacctatcatcagctgtgttgtggtgattatcgtctgattgaaccgtttttgctttaaaaacagagtgaaacctgagagaggaactgttcaggagaaccgtaatcagtgatggatttcttgtctgtaggagtgatcatgacagagacattgctggtggcgtcaaagttgtcctcgaatcttagtacttgtcctggatactcaatttctttacttgggttccactttgatgggatctggattttgaatccttctcctgtgtatggcaggaaatctgtgttcttctttggcttaccaaacacattagctgcaaaacaacaatcaagatttgcttcatgattctcattgatatatgctcaaaatgtatatagagaaagtgggatcataccggcttcaccataggcggcgcaggagagactttggatccgatggctgcagcaccaacgagtaaggtaagggcaagacggcggaaaacagcagagttattgttttcctgagactgttgagctctacatactaaatggacgggtctcgagagggacacatgacgaaacgacgatgaagatgaagatgatgatcgtccggcagaggaggcaagtgcactctggtgtaagaagctcgggctgtacgccattctctttttttctctttcttgttgcaacctgaagaccaaagtgatgaaactgtttgtaaatatggagtttaagaaaagagttgtttattggctaatttttggatttttgggcatctaatcttctgtttggatgtcgggataaggttgtataagtgctccatcttgccacgtggctgtgagcctactggtctgaatgaatttcgacgtgtttgatctcactggaagtaaaatgaaagtatgaaactgctagaagaggctttatgagtaacaacaacaatagttacaatactctggaacatattagagcaacatgaaaccgttaaaaactccgtttcatgattagataaatagaaacactttgagccaagaaccaccgaagagacatggatccaaacatgaattgtttatacatcatcaattcctctgctttcatgggacccaaacccaaacccaaaccaaaacccaaaaccaaaaacaatctcttttcatgcatctcacttctgttctgctttgtcttcgcgttgcctctttggaatatactgttctttcttcttacccgaatccgagttgttgcctgacctggtcttggttttcttactgctttgattcttcgccattggtgcggcagcttctcttggaactgtgttatgttgcttattcccataggcctgatcagaaggcatgttctctttcttgttactcgaacccgaactgttggctgatttgtgctttgatggcttacccgtagaagcagcttcaggctggttaatcctattggtgggattaacaaacatcttctctttcttcttacccgaatcggtattgttggttgctttgggatttctttgcttatagttttgctgcctaggtattgatgcagcttctgttggagccatgttgtagttatgctgctgattcctattcgtgtgactaggatgcttgttctctttcaaactcagagaccaaaagagtgagttaaggaaagagtttggtttctcttcccatccaccggtatcatacatctcagtccttgaatgttttggtaccatagactccggtggacatgaaagtcctgcatgaccatcatatgagagaataccagctattgcatgcatagaagctccgagatgaggtggcaaatgttcccgtggatgtgttacctacaaattgccaataaacagttggaaatcaaatcaaataaaagaacccttaaaagtatggagtagttttaagcataatggattctaaactcaccttgaataaaatagaagccattagtcgttcccgcaaaatgtacatttgagcaacttcaagggctgtggttctgaaaggcagccagcgatcaactactaacttgactgaattttcaggtgaagacatcattttcgctccacgcctactctcttctttatgtatgtccattccttcttcattagtattagctgctacttcttcattagtattagctgctacttcttcatcatcttcttcttcttcattactatcatcagaatcactgctccctgtaggggccacagctatctctgttgagataagtaacaaaggaagatcacgagcaacagtacagtttcttatgtgcatgcctccatctccacgagtgatctcatcgaaaacgagtaaagattcatcatactttttagacgacaagttgaagttgtttgacagcgaatggacacgaactttagcaccactagcagtctctactatagttcttcgattattaccaaaagctgggcacaatcttcccaccataggatacaatcctactgctagcacagcacggagtataccgggatcacgcgaattttggctacaacttgaaatgtcgttaggaataatcccatgtcttttaagttccgactcaagttggctacgcatttgatccaacatcttcatagcacttggagagacaaagtactgagagcaaaactctgctgaaagacctcttccttttgcgtttttccagcactcaaaggcagcaacaactgcaaggtgatcactgtcacctccacaaagtgatgcaagttcaagttttgcagcagcagctttctgtctttcaacaggcgacatgggcatcgtaaatggttccttgtagtctgctgcacatgccagagtaagtgctggatccagacagtttactaacacagcgaagaatagcattttgctaatcagaggatgaactgggagatgaccaaatttctctccaagttctgtcagctcttcctgaggtgtcagggcaccaatatcctgtagtatgcttaaggcgtttgcaatactttgatcaacaggcgggtccaacagtttctgaaggaaatcatttgttttacaatttggatcaagtatcttaacctgagaatgtaatcaaagggcaatgatcagtaagagattgcatacgcacgaacggctcacagcatagaaccaattgctattaactagaaattaaatgaggagcagtacttgtaagcagagttcttctaccggcatcctcttgatttcaggaactttaaaatctggcatagaggctgcccgaagtctagaatagagatgataacaaatgccaggttggcagcggcctgctcgaccctgacgctgttttgcatttgcttttgatacccaagaagattggagagttgaaacattattataaggatcatagctcttttccttcatccggccactatctatcacataaaccacatcatcaatggtaactgctgattcagcaatatttgtcgcaagcacaattttgcgacaacctggaggggggcgattaaaaactttcttctgttcccctgctggaaccattgagtgaagacatataatgtcgaatttagcactatctgcaaagaaagggttctcaagtaatctctgtcttgttttatttatatcatcccatccaggtagaaaaacaagaatcgcaccgtcttctgaatcgccacatattttcctcattaactgttgtataagactcacatcgacctgctctgggttgattgtcgccatgtatttatcaagtaactgttgtccttgctgagaattagactgggaattgtctgcatgctccctgattatttgagcagcttctagttgattctctgcttcagccaattctaatgcagtcataccatctttagactttaagctccaatctgcaccaaaggagaggagcatgcagacatcactgatcctgccctttccagcaaagaccattagtggtgttagccaggttgattggtgctgataattgtagatctcatgacttcctctagaagaaactagatctaagagggcatcaaactcgtcatttgtccaagccaagatgattgcttcatctaaagcaagtttatcctcatccgtcaaatcaagcttgtggtctgatatactcaagttggtagagcttagatgattatctccacctgatttcagaatagagagcacatcctccaaatataaggttctcacctgtagacacaaagcaaggagattatatttgggcataaaagaattaccatattcgagatatagagagaaaaagagaaattaactggataagtgaatccagggacacggacaaccgggcaacctccaaaatatccagaaaatctctcagcatcaagcgtagcactcatgagaatctattggtccagaaattttcaaaaaatcagctaaagagtactgtagtcaggccatattcaaagacgtttaccaagccatcaagtccagctatctcaggttcttaggctatgtacacaattttgtcggagttcacttgttctcagtgtctttcgaccaagtatcttttttgaaaattctaagaacgtcacttcgccaacacacaaaaatagcaggaaagaaatctattttgtaacttgtattgtgtcatcttttaatttctaataccggagggaaggagacacctttaaaaatacaaaacctactctatttcctttcttttcagaggtaacaaggccgtatagagtcaccccctctaatatatccgcttccctcttctatttagtaaacgaaaagaaacataaacaaagccaatccttcttcattttgttctcttgttataagtgtaccattgcagtgaaaagcaagaagaacataaagcttaactaaccagacggagatggggatttgatggaagcaaatccctgcaaatcaacaaaagcatcagaaattcatatgagttatatcatacattcaaagaaagtaaattaattatcttctttcatggtttgcggcttaagagaagataaatacatgtgtaccagtttattatttagcacataaattatggtgcggcattaaacaatagccttaaaatcagtttcttaggtcacatacacttgatttgattaatagacaattgacaagttgagaacctcaacgtttgagagcaaggatgtctaccttataattgccaacatgaaatcagaatagcaatctctttcatggatttcatcctacaaagacatgaacgcactgatcaatgtagaaagctacagaattaaatttaaagccaaagtgaaaggtagaggatctgggatgacaaacagcaacaagaaggcttttcatagtgacagttgacaagcgatttaattttccgataatactcatcatacatatgaaacacacacgtaataggcacatgatagcagagcagataagaaatatgtaaagtaccacaatgatgtgagttatgtcggaaacactgctaacagagccttttcctacaagcaccctcaggagaataccattcgtgcagaaaacaactgatgagtgccttccacctttgctttggagtcgaacctgagatttacatataaagtcaatggtgcacttgtctacaatattgaaacacaatcacctttcatgtacaaacgcaaatatgtctacctacaaagattactaaccttgtaaccaatgttttctccaatgctttcacctctttcacaagatattctttcagaaacttcaaaagagggataaaaagacagtaaggggtaagcattatacagcgtacatgtggataaacttgaaatttcaaaagatcaacacaaatacatagctgaataaaaaaatgtcaacctgacatggcggatatccgacgaggttgggtgcaaacaattttgcaagtttctcttttgcttgaccacatatggtctaaaagatattgaggcacctaaaacattaaacaatggaggcacttgagaaacctcgagaatgaaaatattgaacgcaaattcaactgaacactctttacatggctaatatcacaatcgcagctcacagtaagcaaaatttctaaggagatcattctactagactaccgaaaaacaagggataacaaacacctgagtagttttcccgcaaccagtttcaccagaaatgagaataacctgcgtttacaataagaatgtatgatgaattctttttcaagcagtggaaatcaccacagcaagcataaccatacaattagtaaattctaagagagaacatatcaaaaatttcacagaacctgattggattccactgcagatgtaattgcgtctttaaaggatgtgatgggaagctt

SEQ ID NO: 312 - DNA, 89779 bp, Arabidopsis thaliana
gaattctttttcaagcagtggaaatcaccacagcaagcataaccatacaattagtaaattctaagagagaacatatcaaaaatttcacagaacctgattggattccactgcagatgtaattgcgtctttaaaggatgtgatgggaagctttgaccgcagcttagtgatctgtaacataaatcaacaaaaaacaatttcctttcacttgctgatacttgacatgatttataacttctcaatctgtattccggataaagaatcataaattacagtcctttcaaacaaaagacacacatctcagcaacagggtattaatcctaacctccttaagagctttatccttcttaagtctagaactcaaagatgccactttttctagaatctcctcactgctaatctgtggtttccggaaaaaatcatctttccattgtccttgtttacccttgttaccagagtacttggtaaacgatgttgcagccgtatctccatcacaaggtgggtaatgagtaaataactcctgcagaataacatctgctcccggcggaaatgacacacatttgagcttctctttatttgatttctcattagcttcattcttgtttccattcttatgcctacttttgaatatcgaaagacgcctttgttccccacgcctattaaaagcatcccccagaatcagaaacaataaaaatgaatactttctcaaacccaaaaacactaactcacccagaacttttcgattgaatacccattttcctgcacatctgatgaatcactccacgttcgttatttgatagattatgctcaaacgtgtaaactacagaacacaatgcaaccaaaattcaataaaattcccaaagattagagctttatgtaatcaatctcagactcataaaatcatttctggaaagaatcggtcagagaaggaaacaattagaatccaaaggagaagacttggtttcccggagctaaattcaccttcgttcccagaggctcgaaagtcttcgatgaccttagtcgcccaaatcctagtagcttcgacggaagttggtttccctgcattattatcagacctgaatctcttgttccccatcgcttattaggctttgctctgtctctctatctctcttctacccgagaaaacactagaaagctgagaaactgtacggcttcttgtgagattcaagaagcaaagcctcgaaatttgttcgatgagtttcgtttttgcccttgcagagtttgctggcattataaaccgccttctcttttttctttttttttttgatgaaaataaaataaattaatgcttcggcatactaggcccattcctttgggctctaaaaatgttccaacttctatgtatgtctgtagttgataagcaaaatcttatgagtaaggaatgttatattgtacttatatgtaatgtatatactataaactagtggcaaaatcttacaagtactaaaaagtgacgtaactactataattgtgcaggttaagtaacaaaatgtataagaaaatgtatagatggtaaatggtagtttggaatgctaaccaactccaggagaatgaatgagatcttgtcaaacttatcgaggtgagacgatggactgttgtggaccgatccggatctggagcatcgcctaggagatcatccaaaaagtacaaagactataattttgattcattaaacgggaggagatttctaaagttttctcgtctctttgtcaaacttaaaacattcattcctaacttagatgaaaatgatttaacattgaattgacgaaactattttaatttttatggatatatgtgtttaattggattttctgatcatgattatgttttatttggagatattataaatacatgttttttaaaaaattatttggaaatactttttattattatttatttaatcatttttaatagagcaaatatattattaaatatctttaatcatttttagtcatatttaggaatgttaaaatatgtcaacatttcatgggtcaatctaaccaaacacgattttaaaacatggcctaaataaattcaatttaaaaagatcatatatcttagatataatatgggatattgttgtgaaatgtttagaaaaagaaagagagaaatgcattttgtttggatgagagttaaagagcatccatgttttgtgtttgtaagagtgaaaatataaatctaaattgttcgtgatttaaagaaagaacttacacgaaaaggtccaagtcccttcaatttatttgtgcattaactttaattttgtaatagaagaaattatgaaaactccatattatattctatattgaaaaacaaggattacaaacatagattttattgagagataacaacgatagattttattttgcttttacaattttttgttttcatggacattttggtccaccttctttggtcgtccaattattgtagcaaggacattcttctttgtgtccatatgttcccgatggtacacacaaacatttgttacaacatttgttgcaaaaaaacaaacatggtttcctgtgagatgtcgccgaacatcgatattcacatgcctttggacattcttcagaaaaatataaatcaacaattaaattatttaagttgtgatttgatcaatcatttactatataaataaaaataatatcttttaaacaatttaccttctggtttaagtgagccttctcctccattctgaaattggttggataacaaaaacaaatttagaatgcaaatcaatggagacgataataatatacatttgtgttatcaataaaatattttaaaattatgtagtttgaaaaataacattgatattcttgttgtaatatatttattatttattattcagtatttgatattttataatttaaatataccttatggattgcaggtgcttgagcttgactctctaattcatcaccctgtacatacacacataaaaaaaaaaactttatttctctgaattcataaatcataatatgaagaaaataataataatttttacattagaaaattgagtagcaaacaacaaactggatataacaaagacaactatgagcttcatcattttgatctcttatttcacttttgattttcttatgatatatttcaggatcaatgttaaacctatttataaccaataacattggcatagtatagaaggtattttaaaatatcaagaaattatcaaatacaaggaagcatttaattattcaaagatgtgttttcttgaccaaaataatttaggaataaaattatgaatgaattttggaaaacaatttattaactacatgcattatacaattttaatataaaggattaaggagtaaatatattaacataaacaattaattttggtctgtattttaaatattttaatcactaagaaataagagaaaaatagctgttatttaatctattaaataattcctaggacaaataaaagctattgttttttttcacaaacaaataaaagctattgatacttagtataggttaatagcagtaaactccattgtgctcacaaaacatcttcacatcaattctctttagcaaatgaaaaaaatgctcaattaagttcggttcaaaaaaaattcacaaacattttaagtgcaacaaacaatctaaattcaatataagaatgttcaagaatactagaatagtctaacaccaaacccaatctaagaaaattcaacactaaacatcaacatttagacatcaattcgtcctaatctaacactaagattcaatagaaactactcacattaacagtcacagatactgtaattagctaaaaaatattattagaaggaatgaagaggattgggccacgtaggatcacacgcgcccgcgagtgtaaaaacgtacgaaattatgaatcttttaataacaaattcgaaatttgatgccatttcaaaatcgaagctcacacacacacacacacatctctcgcaaaagctatttggggattttcaaatttgaaaacaaaagactcacagagactcagacccaccaccaccaccaacattctctttctctctcactttctcgggaaactatttttccctcctcattgagagtgtttggttgttgtaggttcctccatcgctgttccttttttaccaccaatataattcaaatcacgacattacagaaacgcttcataattgagtgactgagccataaattcgagacgctcggattttaccgacggatcggcttgttgagtagagagccatgggttgtctcttcggttgcttccgtgctaaagacgacgaatctactactgattccgtttctcaagccaaacataacgtaattctaatcgtttccttctgtttttccagatctttgatttgcaattcagtgttcaattcagctgtttcagtgttaacatctttggtttgatgattttcagagaggtcatgagtcgaagaatcgtttgtcagctttgtttctatctgaaggtgataaatctcttctttgatgttatatcacttaatagttttaaacggtggtcttacttgtttattgtttttttgacgcagcttcgtcgccttgccatgatgacagagagggatctagtttgaattctatgcatattgataaagatctcaaggatgacgtatgttcatatcgaaattatacttaacaactcacgcttaagattttggctccattgaaattaattagcattttcgatttgactggaattctagagttaagcatctgtcattcatttatacttgggagacaataattatgtttgcttgagacatgttcttcttttgcttgatatgtgatacttgagctgaagctcttctcccgtaatgagaagaagtttttttttatgtcttatgttattgaagaggtggtctagactctactagtgctttttttttctccattaggaatgcatcatttgcattgtatataccacagcctttggctttgtccttatatttgattttccttttctctgttttggtgtgctcagttatttgaggtgttggttttagaacttaattctttgtaaagaaaatatatacattatacacacagatgtttttttgggatgaatgtagcttatgtatccatgcattattgtgcaagtgtgtggaaggaaatatgcttaacttgcattagtgtctgcgtcttttatctttacttgggaaattatctgaaatttgtgtgcgttactcttctcaagttgaaaatcctgctagagcttggcagatatatttgtttgcatataacaacagaattagattaccactttcttcaatgagaacctaatctcactttgctttacttatggaattacaggcacagtttcttaaagtttcctgcgaaataccagcgacaccaattgaagttaggaacacatccaaaaaactggaaactcctaaaggtggtgaacatttacgatcttccccttcctgtaactctgaagtagtgtttcacttgaatgagaaaaagaatgagccctgtgaagaaatgggaagatcattagatacttcagagcaaactcctagcaggtgaaactgctaatgttactttgctagataatatctcttttagctgagcttttgaaaagtaaaagaatcttggttctcctttcaaatatctagaactggcatgattgcttgcatatcctaacataaattcttacatcaggcaaatagttttagaggtttcatggagctggaatttactctttttctaactttctatcagttgcttgaccgatgcccggaacaatgcaaggatctcttctgcatctagtgatgatagtgaagaaagcattggtactgtgttcagggatgaggtggatagaaccggcgttagagaaaagacaaagtcagtgcggtctgaaattgactttggtcaatcttactcttctagttcttccaaaaacagaactgcaagcaaacctgaaatggttggaaaaacttctatctcagctacctcgccttatacaacctcaatgaagctatccgatgagattcaaacccctggaaccatttttcctgcaaatatggaatcagcaggaagagagagacgtagaatcaggtctcagtttgtgcattcagcttccaatctaattgtgaatgcctccctatgtaagctccacgaagattcaaatgcgaacctagaacaagctaaagttcaggcttacaaagagaagacagaaaatgaatctcccacatcaacaatatgtggggaaaagttggaagagagttcagatggaaaaaaacagataggtgaaattagtagttctcctttatccataaatcctggagacagacctatcattggaatggttgctgctcattggaatgagaaagagcattctcaaatctcacccaaatggtgggatggtaatgggataccaaactctacaaacaagtacaaagaggtactctcctgtttctttccgaatctctaggtttcttcacatttcatgtcattcattatgaatatatatatttttttttggcactcattatgaatatatgagtttctttttataatgcaggaccagaaagtgagttggcatgcaacacctttcgaagagagattagagaaggcactttcagaagaaggtggtcaaggtttcattcctccaaggtatatgtctctctttccttacacagtaatacgtgattgcttatgtttttgtcagatcacattcaaactattttgggatttgaagatagtaaccaatgacgcataaacatgttatgttgcaggagacttggaacagtagaagagtctgaaagggacacagctatatcacatctgcgacattcagtcatttccttttgaaagccgtgtagtgtctactgaggtaatattctcttatgatctcttcttaggttgattatgttcagacggaagtacttgaaaaaatatttaactgaaactgcggtctagctatacctcaactcaagaacaacaaaatgaaagtttataagatactgatggtttatttctatagattgttgcatacacctacacggctacacgataatatatgtgaaataagcataatttctcatgccttgttatttgttatatcctttattttatactaaaactctagaaatcctctgattctgagatttggatccaccattactgtcagatcctgaaatggagcaacggtgaggtcccatcgagtcctctagccaagtaatgcctcgccatctcggtcgtggttgtgtttctgtacttgggagggttttgtttagatagaagctctttcataggtccatatacttgctcatttggtatggtgtgcatgaagaaagatgcgcttgaaatgcgaggttcttcgcctctatttgccaaaaccctgtgctccacacttacaaacttatcgtttgttataagctgcaagcaatcattaaaaaaaacgttttgagatttgtcaagatatgcaagattcaattggtgtatcaagtttcttaaaaaatatttgcctgtaaaagatctccaaggttaacgattagagcttcgggattaggaggaacatcgatccagtaaccatcatggagaacttgaagtcctccaatgtggtcttgaagaagaatagtgataaaagagatatctgtatgtgaactgataccaaaggttcggtcaggctctggacaaggcgggtagtaatgggagagcaacgacaaactctttgcgcaatttagctctttaaggtggttaggttttaaaccaagagcttctgataaaagctcaaagattagctcccctaacttcatcattcgcttggagtactccaacatgatttctctgaaatattcaccaccagagttcgttattagttggaaagtttcttataaccgaaccagaccgaaatttctcacctcgaaatcgaacaaacctccaaactcgaaattttgtaaatgaatttagcttaaaaagcaaatcacaccaaccaagattttcaacataacataataacatgagggtatcattatggatttagctaaaaaagcaaatcattatggtgatgaatggtattcattttcacgttgtaaatatgaattccgctgtattataccattcatactattcccacaaataggtaaaattaaaattacacaggacttaatactttgcccacaaaaagtttgcactaaaatgtaaaaaagtttattttttctttgaatataatttaacaaaaagaagaaaacaaccataccgacaaatcacgggtaagtcccctgcttgtggaacatcaggagccataaccatagttaaagtatctctccaattcgcagcttgagagctatagagatcgaaattagtgttatacttaacctttttagtgatgtcacgactatagaacgttttcttaacttctgagtcctgctcatgaaacccacgaatcccatctttcatactctccatcacctcgagtggaatcccatggttaatcacctgaaagaacccgaacttctcaaccgcagctctcactttcgcgatcacgctctttcgcgtgaccgtggactcgaacacgccacctccaacatcgattgttggaatttctaacgttgaggaaggtttagggtttgtaacggccacatcttggtgatggaaaatgcgaggaacttttgtgattccggcgtcgacaagacccttcacgccgatcttcatctggtcgaatgcttttacctcaccagcacgatcatagttgcccgccattgtgtctctctttctttgacaagaaggtagaaaatgttgaaagaaagagctacacagacgtgtgtgctccgtaatgtattttgttgaatcagaggtacgtgagctctccgtgtatataacaaaacaaaagtatttggtgtgtgtgttaaatgtgaatcatacaatttcaaagttgaaataatactatattatttctcaacttttggttgatgtaatgatgtttatatctcataaagccatgtaatactgtccttgaatccatcttggtcggtcactcggtcctaaaacattctgggaccttgtacgaagcaaacaaaaactagattggaccctttttaataattctagcatacttctgtgtttttttttagtatagtacaattcgctctagagcaaaacaaaatatattcgtgtaacacattattttttgtccttttatatatcaatttttgagaaccgcatacagtattttgtaaactactgttttttttttgagctgtgagagatattttgttgcattttcttaaaattatggcaccttgattataggggcttgaattgctaacacttcaccagtgctcacgctaaagccaaataaaatgcttcatccttttgtgttcaccggtcttgaaaaatgaaaatctatttgttaatgcatggattcgtatcgtaaagaaaagaaattgatatcatatttttcataaggtcgttatggtatcaacaatcaagagtcttgatatatcaactctcaattttgttttgctataagctcaaatatttcaactctaattttctgaccattttcttatcttgtggccgtcctccaccgtccaacttcagatcgatgaggatgaacatgacgctcatcacctttattctctatttgatcttgccattggcaactccgaatgcaccactaaaaaaatggaaatgattcaatatatgcaaatcgcttttgttagtaatagatctcgctatcgttctttggtcttgcaataaaggttcttatggcgataactcgtgttcgacattgttaactgtaatgatttttgcaccggctaagggattacttactagggttccttgaaaaataaacatagcatcatgagtaatataagattattcaataagcccgactaccaaatgtataacatatcccaactcattgcctaaattaatagcatcatgagtacatttgtttgagtgtgcgagaagctttctttcataaggtacggaacaatcaagtgaaactgtagaagacctgagttatgttggtaaactccaaagtttattttatcagatcttgaaatcaagcaacacagaatttccataaagtcctcttgccatgtaatgactcgtgtactcagtgacggtagtgtctctatacttgggaaggttttgctcagacaaaagttcttttatcggtccataaactcgtaaactcggtaaaggatgcacaaagaaagatgctactgagatccgcggcttttcacctttattagccagaactctatgctctacgctcacaaactgatcattggtcataagctacaaaacaaatcacacaaacaaatataaatttgtatcaaacgaacagtttgtatcatgtcacaataacaacttgcctgtaaaagatctccgaggttaacgagaagagctcccggaacaggaggaacatcaacccaataaccattctgacgaacttgaagcccaccaatgtgatcttgaagaagaatagtgagaaaagatctgtctgaatgcggacttgtgccaaaagttaaaccaggctcaggacaaggcgggtagtaatgagaaagcatcaataaaccttttgtgcaatccatttctttcaagtggttaggattcagccctaaagcttctgataaaagctcaaagattagttcccctagtttcatcactcgtttcgcatattccaacatgatttccctaaaacattcacacaactagataagtcttctttctttctttctttcttctatagactaagaaataaaggaaatttgtatttcgtacccacaaatatctggtaagtcctctgtttctggaacatcaggagccataaagcaactcaaggtatctctccagttcgctgaaggagagctataaagatcaaaattactgttatacttaactgttttggtgacgtcacgagtataaaactttttcctaacgtctgagtcttgctcatgaaacccacgaatcccatctttcatcttctccataacatcattactaatcccatggttaatcacctggaaaaacccgaatctctcaaccgcgtctctgatcatcgcgatgacgctctctcgcgtgactgtgtactcgtcgaacacgcctcctttaagatcgattgttggtataaccatcgttgtagaggaaagaagtagatttgagtcggttaaattaagatgtggatgatggaagatacgtgggatctgagtaactccggcgtctaggagaccttttacgccgatcttcaactcgtcaaaagcttttacctcactagcacgatcgtatgttgcttccatcttcttcttcctttgtgtcaagaaacagaacaaagagaaaacgttttctaagacaataggtatctgcctactactgttgaaatttggtacctctgtgtatattataatagaaaatgaggtaatcgaataaaagtcaatggaattaaatttttctgattagccaatagatgagaaaaggcaaaaagattcttcgctcaagtctatatggctctgttcactgtcggaaaatgagtgaatttgaaacggcagctgtttcttttcatccaagtagctgccgggaaaagaaaagaaaaaagctcaggtaacttgtgggtcttgcttgagactcacggagttttcacctatctttcaatagttgactttttcactaaataacaaaactgttttaaaatagtaactaagtggagatgcggggtatcgatccccgtacctctcgcatgctaagcgagcgctctaccatttgagctacatccccacgatgactatttattaaaatattacaatatttaatactttcaacgtgtaactgatgcaaaatacgagcggtgtgtgttgaaaagggactaatgattgagagaattggagataatgactaacgatattaatagagaaatcagaaactaaagtcggatactatctaatcagtaaagtagagatgtgtgtgattgactaaattttagaatagttatgttggaaagagaataaagaaaagttaggaggatctagggtaaaattttcagtttgtattaagtaaaataagtttttactcttactatctcaattggagggatttttttttctttctttcagctgattagtgtagtatacatcaagctaaaacaaaagtaatttgtttttcaatccactattgttacgtcaatagacattaatagttacactctacatgtcatgaatttttgtcatttcatgtatagcttccatttatatattaaaaaaaaaaaacatattagaagaagtaaatacctaatagataatctttactttgtttattatttatgattggtgtattcagcttataaaataattaatatgcatcatatttgtttttacaaaaagtacattgaatatcatatgatttttagttttttttttttttttcatttaccctcgatcttacaacaaataataagtccagtcatacgcacctaccaaaagaaccaattgaggcatgtggttcagtggttagctaaacggatgggctcattctctcacgttttattttggctccacctacccacttcaaaccactaaccatctttgtttcattctctacgtctttccttcatttgattttccttttctcataaaaaaaacaaagcatcatcaatcaattttatttttattatgggatccctttttattatattcaacgaaacctagttctttttcttaaacgtcaaaaacaatgagttcttttactaattgactgtttgagtttagaatctagttttgaacccaaaaaatgatacttatataacttcatggaaaactttgattctaaatattgtatgtagaagtatcctcaatatacaaagtagatttgcattgttcgacttcaatgaaatgacatatacttctaattgagtgagatagaaatatctaaatgttttattttcatcggttgaccagatattacgacgttcttacaagagttttgaacccaaagatgggttagggtgggtgacatggatagatattgacctgtgggctctggccaatcaactccgacaagatagaaatatctaagttattattatttggtaacaaaattgtatattatccacacaagagtagcaaataatttgtgttctacaaaatggtgacaatattcattttcaaagtaacaactaacaagtgttcagttcacatttttaaaaatcaacattcaaaaaaataaaattcaacagattgagattttgatttcatacaacattaaaattcttaatatagaaaataaaaattatatgcaaagaggataagtaatattaatgttggaaaatcagttttcaataccagtaatattttatgtaattagttttccgaaatagttatatctgataaattttgtcataatttttttgattgtatggatttgataataacacacgtttccaccaatcaacaacggaaacgcaacgccacgttccgccacgagtcgcgattctctctcactctctctcccatctttctctataaaacttgtgtcgtggacactcttaaaacttcactcaacaaagcttaaccataaactgtgagtaaaaaagagaagaaagaaaaatggtgctaaaggtgtacggacctcactttgcttcaccaaagagagctttggtcacactgatcgagaagggcgttgccttcgagaccatccccgtcgatctcatgaaaggagaacacaagcagcctgcttatctcgctctacaggttccttccttcttcttcttcttccttcatcttctctgatttcttccttttttctccgattctgatggtttcttgattcttcttcctatgcagccttttggtactgttcctgctgttgttgacggtgactacaaaatcttcggtaagatctttaagaaaatttcagtatctgttttgattgtttctataataaggtcaatttcgtcacagaacaaccaagttctgttttaggtcaagttctatagttatgatttgtgttggctcatgtttgttttggttgtatgtatctatagtgatgctaagagatggtttttgatcttttgacagagtcccgtgcggtgatgaggtacgtagctgagaagtacaggtcacaaggacctgatcttttggggaaaaccgttgaagacagaggtcaagttgaacaatggcttgatgtggaagcgaccacttaccacccaccgctattgaacttaacgcttcacataatgttcgcatcagtcatgggattcccatctgatgagaagctgatcaaggagagtgaagagaagcttgcgggtgttcttgatgtctacgaggcacatctctcaaagagcaagtacttggccggtgacttcgtgagcttggctgatttggctcacctcccgttcactgattacttggttggtccgattgggaaagcttacatgatcaaagataggaaacacgtgagcgcgtggtgggatgatattagcagccgtcctgcgtggaaggagactgttgccaagtattcattcccagcttaagatgtgttcatcttcttggtgatgtggtttgtgttttatgagaggtttaataaaagtggaactaaatgtacctcttaatgtaatgttgccacctctgtgttctctttccttttgtagtttaataagtatctttatggctttgtgaggctttcaattttaaggaaatgatcttttcccctagttctactacttgaatgatttaactagcttaagaaaattaattatgaatgaaaggtcggattagcgcgcgagacgggagacctagtcgatggaatctatcttattgattgcatatcgactctcaataatggataggtactgaagtatgaaataattgatgataccttcaaactagtttgcggtttaggttggaacatggtctgataacaaaagaacttccacaactataaaatctaggttggcttcttttactcggccttttgattcataaccaaagattcttggttttgtgaccaagaccattcgaatattggaagaagtgactgatctagcaagaaacactctaccagtaaaacaaagtagagagaggtaccctaagaataaaatcttgattttcatgaagctttttgagagaagcctctcagcttatttatggataataaagtgcatcatcagacgatacactgatttttttttaacatctctaccaaatttgacaaaagtgaaagaaaaaaggtttattggtctttcggggccaatgatggatagtataaattaaagtatagacactataatgaaagttggtttcgataattagatcactaatttttgtttaaggcatctaataattgcgttgataaagtaatgttatctgtcagaacataaattacaaaaataagagggctcattcgatcacgttttataaatactttcttgtacccaccaacctaattttaatcggctaacttaggttttccattgcctgatcattttttttttataaccaaaacaaaacaaagtgtaatcaagtctcgtaactattttattaaaatgtgttgattcaaaaaagtgagaatcattttggcatcttattacaacaaagtggggaatatctttaatcaaatatacttacaacaagtggtctctctctttattaggcttattaaaaatgaataaataacattgttaaaaaacacacacatgtaattcataatttgatgggacgttggaaatttcgtgctgagaaaagtcaaatatgacgtgaaacgttgccgccactagctagccgccacctataccgacacgtataaataataatatactaataagtgcgactgcgtttagcctactaccgcaaacgcagctaaccagatccctttttctctctcttttctttccctctataaaatcgcgtcctgctatagtgagtttagaaagaaactgatagtagaaaaaaaaagagagaagaaaaatggtgttgacaatctatgctcctttattcgcttcttcaaagagagctgttgtgacattggtggagaagggagtatcattcgaaactgtcaatgtcgatctcatgaaaggagaacagagacagcctgagtatctcgcgattcaggttccgattttccctcttttttactaaatgtttctttttttccggtgactatttccgatcatgatccctttttccgatcgatgcagcctttcggtaaaatcccagtcctcgtcgacggagactacaaaatcttcggtacacttcttctcttttaagctactactacacgagtcatgatctgataatggatctgatcatttgcgatcatgatcaatgaatcacatgatctttgagatttttttgattgtttggaaaagattgtttaggtaaatgagtgttgaagagatttcgatttgtgttgcagagtcgcgtgcgatcatgaggtatatagcagagaagtatagatcacaaggacctgatcttttggggaagactattgaagagagaggacaagtagagcaatggttagacgttgaggctacaagttaccatccaccactattggctttaacgctcaacattgtctttgcaccacttatgggtttccctgctgatgagaaagttattaaggagagtgaagagaagcttgcagaagtgcttgatgtctatgaagctcagctttctaagaacgaatacttggctggtgattttgtgagtctagctgatttggctcaccttcctttcaccgagtatcttgttggtcctattgggaaggctcatttgatcaaagataggaagcatgttagcgcttggtgggataagattagtagccgtgctgcgtggaaggaggtttccgctaagtactcactacctgtttaaacaaggagatgttgacttggggggtttgtgtgagctttgtgttctttgagggagttcgttttcgggtcgattgtcttgttgtttcaataagaaacggaactctgtctcatttgttgtctctggtttcttgtattctgtaacttttcaagcttttcaataagagtttaaaatcagagtgactcaacccatgtatattcctctattcagtgtaggtctttgataaaactggtactaacatcacaaccatcgtggtttgttgaaggattgcatttatatgaaaactggtttatatgaatccaaaaacataagtcaaagtttaacacatatctctctgttcttcatgttgtaataaaagggaaaaagaatcattccctagtcagacaaattcaagagcggcagatacataacaactcttgaatgtacaagaaaactaaaaagacaaattctttttgttgttagaagaatcaactctccaaacattaccagaccatcaaagagtatattaaaatgtacgaagatctaccaatctttattcaaggctggtgatgaaatgattcggaaggcggatcattgcgtggaacgttaggttcaggagacactaccgggatatccaagctgtttcttctgtcccgttcagtctctgcagatatttctcttacatcagaaactcttgcctctgttgcctgaatatcattccattcgttttctcccaccggaggctgagcgtttactacctgctcttcactcatatggactacattctctcccggtatagaggctgttcttgaaatgctcagacatgctttatccacattcttttctgtttcctttgtcattggaagagaagcttcgccgttagtagactcagtcttctcctcacacacttgctttgtctctagttgctgcctgtttattcaaaaataaagagatttatgacccttcaaaagtcatgagtttccctgggagatagattcagataggctcacctttgaagctgagtttgtaacatattcacatatgctaaaagctcttgcttctctgtccaagcagttgcttctctctgagaagcctcttttgattttgcttcaccgcttgcttctgcaaccctcactttctcttcggccctcacaacagctccttcaagtatgacaacacgctctctggctttcccaagctcagaccgccacatatgtgcctcttggagagcagcgtctctttccttaaccaattgatctttttccttactcaaagtaaaggtcttctcttccaattccttgagctacataggagataaagatcaaataaacaacaaaacatacacaaggatgcaaaagtatctatatatgacatggcctcattacctttaattttgtggcttcttgctgtctctgtgagtctgtagtcaagcgctcaaattccacacaaacgattttcctttgttcatccattgtatgagcagcagatgctgcagctacagctgcttcagcagtctcagatagcttatctgctatttcctttatcattgagtcacgagaacgaagttccctggctaaattatgtaattcttcatctttgacacgcagagtttcctgtaagatgtaagtggctcaataaggttaacctggacattagaatgaagatggacgaataagatttatgctaattctgttaattttcatccttgacaagcagagtttcctgtaaggtgtccctatatgctttcatcgttcatcttgacatttcagaatctcaacagccaaaggatgtcaatatgctattcacaaaagtttcccaaattcgaagagaaagagagatgcaaagataccacaccttcattattgtcaaatcatctagtggtccatcaatcggtttatttggcgttattttcaatgcattcctcaaagagatctgcattgctgcttgaatttctctggaacattccaatgctgttgaattggcagcggcaacaacggttgcaacggtaccaagtgttgcagaaccacttccacttagagattcgacagcctccttatgggcctttagaactagctgtgtcgcactggaacgaacaaagaaagataaggtttatcagattggcttttgaggggcatttagaaggtattacattttcagtaagaaacgtaaaaagagagagaaagatgattctttcaacatggtcgacgacgaaaccattaaatcaacacaactatgaattatttaagatagatgaaataagcggggtggcttctctagagaatggtaagtaaataaaaaggacagaaagagaagcaaacaaaaagatgaagatccagatgacttactgtaaggttgtgacccaagctttagctgcaccaggagtctctgcacacaaaaagtaatctttcttctgtggggtaccaatatcttatatcaagttgaagaaaattcaactctagattccaatcaactatctccttatagacaaaagaaacaattataaatatgccaacattttactaaaaccaaggatacaaatacagcaaccattatattttggaagccccctgaaacacaaaagaaacaaagtcaatgatacaaacagacaccaaataatgatgattatacagagcaacaaaaaaaagaatgtagcatccatactggaagttgacaggagagatggagattgtgctattttcgtcaaacaaaattgttcccttgatagttggctcatttcgcctcgtcctgagtcatggaaatacatcagaaatgaataaaaccatgatgaagtggtctacacacaaatgcagctacataagcaaattgatataactcacttatactccattttccctgttgttggatcaagtatcacccatcgttcgttccattttctcagctattcatacataaacacaaacaaaagatattatcattgtgaacctttgaataagccaagacatttcaggccaaaagacttgtttaagctatagaaatctaatagtgagctatcagagagtcttcttagtttgagctaactaagaaatcccaatcaataaagcaaaaactggttttgatcattttcacttaaaaaaattggacttacagtttcagatcgcttgaaaagaggtccttgtagcaagttccgaccagagccagatgccaattgtcgcttgatcttatccaagctgttctcagtagcatcaacaattctctgcgcattttcagaaattgacaaaatgggtcaatttaagagtgtgaatgagaaaagcagccaaaagaaagagactaaattgtagcacacagagatcaagagagaaaaagaccggagaagcgccgttggaagccatgttaattgggatcgacgagatcggaaagctcttgatcgattagaagtgaattgttgctgatcgatggatcgagagaagaagggttttaagaggttttctttggtatagctatgagtataagctgaagaagacgaggttacagaagaagaagaagaagaagaaggaattggagaaaaatgctgttaggtttggtttcgcggaattgcagttgaatctgtcttcactctttcaacgcgatcaaatcaacttaaccggtcggtacgatactggatcagcttactcgtcaaatgaaccggttcttgagtttctcactttttgtttgttcacttcatttttatggtttttgatctgacggtggaggtgtcatcacatgattcttttgttttgtttttggttatgaggatgattaagtagatctgtagaaggtaggctttgttaagggagaagctttacataaacgatgggctaaggaacatcaatgggccgggctgtaacaagccaatcgtttaggagagagcagagttcttactttgcccaactaatctcaaatgtgtgcaagattgtgaaatattgcgtactagcttcgacgcttggtagtggtgacttagacacttagttcacagggacttcaaacatagatgcgttagacacagctttacactttctcttaatcttcaagattttcaatgtactacaacttccctaatggtcgtaatgaaacatgatataagtacataacataatattcaataatatatgagatttgagtaatcatatgtgatatgatgatactctttccttaatagctaggcgctgataactacataggaggaggaaacacaacaacttgttggggatacagaaatggattgaaaagcatcaaagcaaaagagtagtagacatgtaagccaagacaatattcaattttggggttaactgaagtgggaaagctgcaaaacgtgaagtggtcctcttgctttattctacgtatgtagattccttttgtatgaattttctcatttgtttttcacttctatggcattctcatcaacccaaccatgcatatatttcctaaatgaaacgtctaagaagctatcaaaatccatatttttttggctcctttatattcaatctccaaaataagaagaaacttctactatataatatactacagaatttggacaccttttgacatttataagtttgaccatttatctaaaatttggtatgttcttatgattagtgtttgaaaataagaaaatatatatccatgtgatgtggtcattcatgtataccttccatagtgaaatcatgatgtttgttgacagtaacatattgttagtggtctatgagctagtgcaacctgccatgactcactttcccttgcaaaatctgacattcttccacaaaacataaaagtccattaaaattctacttttggatgaatctgaccttaaggaattttcagtttcagtttcttcttttttttttcatagaaaaccaaaagtgctgtagagtcgcagagatagtgacatccacttgaatattcttctgttttttcttacattcattaattaaattcaatactcaaattatatatatatagtcctttttagatataaaacatcattattaacatctaattaagattgacaaaaatgaagttcgttatatcaaatcgattgcccattcctccacttgcttttcttcatttaaattcagagatactagtaaaataaaccatcaacctccatgcaaaaccatattatataacaaagttgcgagcttaactttttttttttttctttttatcacatttctttacactctaaaagcaaattctaaaacttttcttttcttttctcttcttctatctatagctaagaaactagtggatcaagtattcaagttccatatataccgtcatccaattctttacaaagagctagatacacacaaactttaacagttatacttatgaaatgaactcatgaattgattatcatcaattctaaactttgtatttattgtttcaacttcaaaccacatgaagtcatggagattcatcatcaactcttagtctctctcctcttcctcctccttcccctatgctcctcccaagaaaacaccagaagcttggccattgatgtcaatggtccagtcgaaacttctcctatctccgaggttcgtatgctcttctttctctctcgcttatcctaattaaaatctaataatctcaaactcttcataatctcattgatatagctgataaatctttacaatgaagctccaggcatttcctttgtttctgatcttataacctattgagtttatttatcatcgcatgattataatgtatgtaagtcatgtacatattattattccatgatgcttaaaggttatagtttttttttcctactctctgtataaaatgcctgcgtgttaataactttaatcaaaaactctgaatatatattggtatgaagctcttatttttatttttcttgaacagaaactaaatccaaagcttgtgtacgaaatcaaagtgcatggctttatgctttgggcagcgatgggtgttttgatgccaattggtataatctccatcagattaatgtctatcaaagaccaacctataatcactcttcgacgactcttctttcttcatgtcacttctcaggcatgtttcatttttcttggctctcttatttaaattatatatatcaaatatatattacaattcaacaaactaaatcataagtatgttgaaagtattgtataagttgaaaatgaaatttaatggtcggtgcgagaagataggtggatggagagtaaagcaaagatgcttctctcttcatctaaacaataaagattgcatccaattaacaactttttcgtgatttttaattagtactccattagtaattagtagggccttttaggttattctagattgttaatcacattgataatcatggaaacttgaaggccaagctaaagcatctatcttcttcctctttatttttagctttaacgactttctgactttctctttctctcattctgatacttaactaagaaacctcacctactagctagtcaattttgttacaaaacaatatttgataattaaacagcagcaagtacttttaactattgttatctatcaacaagcggctcatagtttacttggaatattaagtgagcaattaacaatgtgattaatttatgaagcagatggttgcagtgatacttgtgacaataggggcagtaatgtcagtaataaacttcaacaattccttcagtaatcatcaccaacagcttggaattggactttacgtcattgtatggttccaagctcttcttggcttcctccgacctccaaggtacttctgtttcttttctcttcaataaaataagctgttacaccgataattctttgtgacaaaattaagctagcttaagattaataacactcattattttgttcttgaatatttctaagaaaaatcttgaatgcaaattagttagacttaatcaaatgttatgatgacgagaactacgaaatgcgtctagtactttatattcaatctttaattgatttactcgcattgcagagaagaaaaagctagaaggaagtggtttgtaggacattggatattaggaacatcaattgctattcttgggataataaacatatacacaggtttacacgcttacgccaaaaagacatcaaaaagtgctaatctttggaccatactcttcactgcacaactctcttgtattgccttggtctatctttttcaagataaatggtcttatatccaaagccaagctacctttaacagaaatcaatccgttgatcataacagcaacatctcaaccgcagagactggccatggatacgaggtcgaagagagtaaaccggagttagagaaatgctaaaagcgccaagctaagaagctattagtaatttggtcttactttgagagattgttttctaggagacaaaaagagtttcaaaggtatttgaattgatttgtagtggtaatgatttgactaactttcgagtttctttcttcttttgttattttcaagtgtaacatgctcatagtcataggcagtgattaagtcgtaacctaaattttagctacatgtgtatcaagaatgagaagaaatgtcccaaattttccgaggaattgacgaaggaacactacctattttcatgctgtctctgacgtatgagtgtcttgaggattaggtttggccgtttgagcattcagcattctaatcaagttaaagtaatagataaaaaaacaaaaaacaaatcaaaccatatgttacacattaacaataatgatattttaaaccaaccgcgtagaaattaatttaggataagataatatacaaagatataaacttccatatattagtattgaaaaaacttccacacataataagatctctagatctctagaccaaaactgactccaacgtaaaatggaaacttatctctttcctcattaataaagattccaacattcattttacctattaagacagaaagaaaatatctctaatttaagaaacaaatctacatgtattttcttaaaccagagccaatagacatatatatcacacaaacacatcatatatatgccgatatataaaaaccaaaggcacacaagaaaataaaattaaatcacacaattcttcttcttcaccaaaccacaaacgttgacaacttgtgtgagtttttgcaatgatgagaggtgctgctcccaccggagtagtatcggtcatggttttaatgatacttgtgttgttaaaacaaatagagagtgctagtgcgaatggttcatcattagggctaccacctagaaagttttgtaatatttatcaaggaagttgggtctatgacaaatcttaccctctctatgattccaagaattgccctttcatcgagagacagtttaactgcaagtccaatggtcgccctgacagcgagtacctcaagtatcgatggcaaccttccggttgcaatctccccaggtgattccatcttttctttatggtatttataacgtttttcgatatgtagatctagtgcgttttaacttttaaggcatgtaactagtcataggtgaattgctatgagtaccactatacttcaggacgacttgggcatcaactagcattgtatcggaaaatttcattttcaaaaacgtctttagtatttcttgagggggattaataggtttttaattaggatttattattggattcaaatccccttttatgtcgcatataagttcatatgtaactatgtaagaatgttatagaatttagtaaccgaagcagctggtacataaatccataactatcatttattggaataaaactgttacaaagacaataagtcacaaaatgttacaaattaacggaagtacccaaccattttgtggtaaattattaaacgtgaatattttctcctatgaatgatatagaagtgttaaattgattaatgatgaatggtgcagattcaacggcttagattttctgggaaggataatgaaagggaagaaactgatgttcgtaggagattcactgagtctaaaccaatggcaatctctcacgtgtttgctccacaacgccgcaccaaaagccaattccacatccacacgttccccttctggcctctccgtcttctcattccccgtaacgttttctaactttatcaaactcgttccggtattgatccggtttaataattctggttcggttcgtatttaaatgcatgcaatgcaggcttacaattcttcgattatgttttcaagaaacgcgtttcttgtggatatagtcggagccccaccgaagcgagtgatgaagcttgactcaatctcgagtggttcgttgtggaaaaccgcagacgttttggtcttcaactcttggcattggtggcttcacacagaccgaaaacaaccgtaaaatcatctttatgtcgtcaaacatattttgctatggactatggacttattagtatctaactaatgtaatcatttggggttgcagatgggacgcaattatgtccgggaatgtaacggttaaagacatggaccggttagtggcatatgagaaagcaatgatgacttgggctaagtggattgatcaaaatattgatccttccaaaaccaaagtcttcttccaaggtatttctccggaccatggccggtaagttctacctctatataacttcttttttattcgatacatacattaaatcaacgataaaaacttaacacgattgatatatgttggattagtctataagttttcgttagaaccaaataatttcatgttgatattgttaacaataatggtacataatgttacagggcaagggaatggtcgaaacaaggtggcaaaggcagttgcataggagaaacaaagccgattatgggatcgagttacctggctgggccgcacgcagccgagatggtggtggcgaaagtgataaagacgatgaagaatcaggcgcggttaatggatgtgacattgatgtctcagctaaggaaagatggacatccttcagtatacggttttggcggtcacagaatggcggattgtagccattggtgtctctctggagtcccggatagctggaaccagctcttgtattctgagctgtttcattcttaaaattttgatggttttgacacaaaactaaattcattatatgatttatacatttatttatgacctaaccatgtttgtgttgttttacacatttattttatgtcataaacatgtttatttagaatttcaaattcatttgtcaaccaaaatgtttaaatgagaacaagattctttgactggtcgaacaatttataagagaagaatttgcaagaatataaccttatgatctcgttataattgaatggactaaatatgtgtcctgaatctctaagtgagagattagaggaagaccaaaactagaagtaaaccttattccacgagaggggataactagcgtagcttatataataactttgtacaatgatttggggttaagttatttttggattatgctaaatcaaaatctaatatagtggtgcaagccccttgacttgggtcaatgattcaaaagcttatacaaaaaaaaaaacgaaaaaactaatagtaaaacattactttagaaaaaagttactaatcaatatttttttaaaaatttcagattactttataagttactctatactcatagactcatagtgagatatagttctatttttacatggatgaattggatcgaatccatttatctacattaatgtatttaactaatgcagaacttaagccttttatcggaaaaaacaaaaacaaaactaatgcagattacagaactatagatttaaaaataaaaataattcgattttttccttattattatgctggtttgcccaaaaataaaggtccaagtaaaactgaaattgatctggtcataaaaattggggctttagtaaaaaaaaaaaaaaaaaaaaaaacatctgtctctttcacttcacgtttgcgactgtgtcgtcgtccacctccggatctcatcggcgtttcatcataattatctgtccatctattcaccgtacgactccgttttaggaatctgtggatgtcaatttgagagaaaagactgtcttcattacaacacatttgggacaacaaggatcactcatggcagtggtggatgttcatcgtttcgctgagtcaatcacttgccatgcttggagtcctgatctctccagtatgtttctaacacctctctgattttgtgattctcttctttctctcttccgtcgttttttccgttttagaattataaatgaggaggatctatctatagttagtttggctgggaagatagatagatgatacaactaaattgacttgtgttattcttatacatcttggtaatcaaatttcttcgagtcaatgttttatatgtctgtttgtcggtgtctcttgttaggaacacttggtatctagtattgtacattagtagatgcgcttttctaaacagatgaaccaaatctattgttacaaatgatttaacgtctgtactaaagcctgtaaccatttatgtgctttgacatttgtttcgtttttcttggtagtggttgctctctgtcctaacaacactgaagttcatatctataaatcattgtctcaagaccactgggagaggttacatgtcctccaaaaggtgaaacctttctctctccctctctttctgtaacttttgaacttgcattccttttgctttctcttcttgggaattccttactttcgtatatttatgtattctcatttcactgatcacttgtcgctgataagtgttgtatagacagcttgaatctcccttacaacaacttcatgattattgttcgtcttgttgcagcatgaccaaattgtttctggaatagattggagctcaaagtccaacaaaatcgtcactgtttctcatgacaggaactcgtaagttgctacctttgatatactttgagaaactccaaacctgttaatcttagtccttcactttttttcgttcgttgaactgagtttagaatgcttcttgaaggtacgtctggagcctggaaggagctgaatgggtaccaactctcgttattcttagactaaatcgtgctgcactttgtgtccaatggagccccaaaggtaaatgtttaatttttctggttcttaagcttaatttccgtaatatgtagtgtaattttcctataatttctacagcttctaatctatgttctcatctttttgctcaatacccatagagaacaagtttgctgttggaagtggtgctaaaactgtttgtatttgctattatgagcaagagaataactggtattttcttcttctgctcctaattctcattattagtccttgattttttctttggcaagtttcctgacttctttgctacgaatggtgttgttggtctatgtaatgatattattttgtcttatgtactggcatgatattagcaccaatcatattttttattatcttggcatgcataactgtgtattgtttagagattttagaaagatactttcatgtaaacttttagtatctgacattgcttggctttactgttttcaggtgggtcagtaagctaatccggaaaaggcacgaatcttcagtcacatctgttgcttggcatcctaataatgtacgtgcaatcaacagaacctcttgtagttcatgtagttaaaataataagcaggctctctgtaaaagcattctctaccaaaaatattctataagttggccaccagattgagtatagagtacatgatccctaaaaatagaatatcaatctccacaaactagttaatcttctaaatcattttttctcgtatgcttttttatgttgctgtgctctctgattgtctgttatgcattaggttcttctggcaacgacatcaacagatggaaaatgtcgggtattttcaacatttatcaaaggagttgacacaaagtatgctcattacttgaacgtctacttttaaaacattttttcaaacatgaggccgtttcttatttgtctttcaatgggctgatacagggattcaaaagcaggctcaccagcggaaacgaaatttggggaggtttgactcgtttggctggctttccttcttttagtaaatagtataccacttctgccatatatatgttccctctactcactctcttatctaatgttagggagctttttttctgttgaaacagcaaattcttcagcttgatctctcatattcttgggcatttggtgttaaatggtctccaagtggaaacaccttagcttatgtaggtcagaatatccttaaaacttaagatgtttgtccattgagctctactggaattataaaaatggaacttcaccttggttgcataatttttactacactccgtctcacttcccttgttcatgcaatcttgtttataggtcatagctccatgatttactttgttgatgatgttggtccttctcctttagcccaaagcgttgcatttcgagatttgcctcttcgtgatgtgggtcagcatccactcttttttttcttttgagaaagtgttctcatgtgttatatcctgaattgatatattatcgggaacttgctatcttcaggtcctgtttatttctgagaaaatggtgataggcgtgggatatgacagcaacccgatggtatttgcctcagatgatactggaatatggtgtgtaactcttagttttctctttcttagctatttccagacaatcaaatacttcaattcattaattctccttagctctcaggccggatagttatttctgaaatcatccacacaccgatgattgccttgtttacaagtttttgtttatggtctgcaggagctttatcagatacatcggagagaagaaagcagcatcttcaaattccagttacagttcgcaggtacataccatgttttctttcttgaataaaatatgagtgaacttagcttattcctgaagtgttcctctaagatagtagtaatctttcgggttagtgtagttgctccttttttctccttgggtttactactttgaactttccacttgcattatttgtactgttttgtctaatcctttttttcattatgttatcttttcagttttctgaagcatttggaaaattctacggcagtcaatcaaagtccacaacagccaacgatgcttctgaatcacgtggaggtgttcatgataactgcataaagtaattatttcttaagctaacttttcttttaccaaatcatttgccagaaacctgcctcattaactcttttacttcgattgtctattaagaacctgacatggaaggttacctgaaaattgcagttccattgtgtctctgagcaaagcagggagtcctaaagtaatgcgattcagcacttcaggtcagtcactaatacaaaatggaattagccgattcagttctcaaaaaacaaaccagcagtttcatttactcgcataacggtttgttatttataggattggatggcaaagttgccatatgggatctggagaacatggaacaagaacttggcaatcagttttaataaacacacaaataaaacaattctggctcacaagcaaggttttacttaagtttaaactactttttcaatttcgtaattgtttcactttgtaaactgccacaataaaaggccttattttcttggtttgtgtaagggcaggtattaataagtttcttggcttcatgatttgattcatttagttagcatcttgtaataccttttatatatagtaatatcagctttgtgtcgaaaggagtccatattgaaccaaacacaacaatttcgcaaaattttcaagttcttgagaagaagcaaaaagctttggtcctccgaactatgccatatttaccacaaaacgagatatcgacaaacattaatcttctatcagatgacagaagtgtgattcagaagaccaaatattctttgaatgtttctcacttattgcaaaacaactactgtcctcgtcctaagcaacttccagagtacctagtttttaaagcatgaactagagttgtaactcagaagcagatatgcagagaaacacgacttggaacgattgattatatgtctccaagatccttccttttcgtcccataagcaatatagttgacactaatatcatctgacaataaccatcttcctgttattgggttgtacacaaatccagctatctctttcacctgcaaatccatagtttcctagttatcacctccagcaaaatctatcatatgaacaaacattcttttcgccatattaccacttgcacacatcgaggcatgcgtacttttgtattgtttcagtcggcttaagattacttattgaaattgacataagtgttattgaatggggagggattagcttacatcgactgaagcacgttgtaatatcatactcatttcttcaggagttacaaaacttgaccactggtgtgtgcctttaggaagctgcaaggtgatttattatacaaacaacaaaatgagtaaccaagaacacatgaagtaaaaatgatgtttaagtgttaacagaagataaataaagtgtgaaactaaagattacccaacgtagaatgtactctgctccaacaatggttgatgcatatgctcgcatagtgcgattgattgtagaaagtactgtagccccgttggggatagtcaatgctgacaacgacttacagaactctgcagggtttgctacatgctcgatgaccttcattattaaaaatcagaaaatttgccatatatattagaagagagacatggaatagtataaatatcaggaagtttgacaaagacgaagggacttgctgaagtatagatggaccagaaaaaggtacctctaaagaaagaacagcatcaaacttcctgccttcatccgctagcttttctgcacaagaaaattttagttcatatttatgcaaaggagaggtaacagacaatcagcttctgtagaagaagattccatgtcactttcattgatcatcatctacgattaaaaaataatacctgctgtagtacataagtattcaatcgttgaagtcactggatccatatcctgcagagacattttattgacataaaagaaagaatagaagtcagatagagaaggggtttcatgaactttagtcctatgccataatgtgaaaacatgttcataactgctcaagcattctgaaagttgccaaccttgacaggactgaagtgtacagttcaaataaataggtattcaagaaaactacttcaccatatggagcacacaattgcatgtaacataaccatacagccactgtataagttatctgaaaaatttaatgatatgcaattaaagtaagagaccttacagcgtgaagacgagcaattttgacattcttatcaacagcatcaactcctgtgacagttgctcccatccgtgctagaggcttcaaagaaagaaaaaacaagctaccgctcaccaaatattctttataactaacaacaatgtcaaccccaagtgtaaccctcaaacgctcaaccaacaagcccaaaaggagagattaccaaactcaaaactattaccagtattatctacttgttagcccctagaggcgcctagactggtctcataaaaggtagaataaaaagaatcatatgccaactaaggtatgcaggaactcatgaaaaaatacctcagaaagtagtccgccaccgcaacctatatcgataaatttcagtccttcaaaaggcttagcagaactcggatccttactggaaaagaaatatattaatccaacagagaaggatagaaggaaaccaaaagtattcacaagaaatgcacctgaagtgcctgcataaggtcgagcggatgaaagccaaccgagttggattcatttgatgcaacggtttaaagggtccttcagaatgccacctttatataagaacacagagcagagaaatcatgtgaaaaccctcaacactcaagactctatattttaagcatccatgaatacattccaagattcaattgcatgaataaaaaccaacttctccaaacaactataaaaaggatcaacctcaatccaaaagataacaagccaagtataatttcaaagcatccaacttttgatcgtttcctagacatgaaactccctctccttcaaattaaaagcctggtctaccatgcattatagctaagtaactatcaccagaattttaaagcgaaggagacgaaccaggtatcagcaatggcagagaatttggcaagttcatcttcattcaaagatgttgttgacgatgtgcttcggcttttattagaagctttgccttcaagcgtttgtattttcggatgcgaagaagaaaaagatgcagccgaagcatcagtgtctgaagtcgagaatagccgctggtgaagtaaacgcgacggaggtattattggtgaagaagataatcgacgagcagagagaagaagtctttgcagctgattcacccgtaccgacgccaacattttcgaaagagaaagcgatcacgagtttcggaaactgcggtcggaagttactgacgtcggattcgtcgtcggcgaaattgaagaagacaagtgagtgagggcaaaagtggaatgacgaattctcgaaggatgtaattttaacgggctacatattaaactatatgggcctataaactatagtaaggcatattaaaaatttagattgatgataatcagtaaaacaattagagaaaaagaaatttagattttagggttaaagttatacgctaattttcacgattgagaatttagagttgagggtttctattttaggttttagtgtatttctttttattaatttctaaaatctattttcctactttcggtataaaattttggggctattacgagaatgagtattttctaacccaaaaactaaaaattggacatttttacaatggacttatggggaaaggtactttggtgagttgggttgacgaaattacccctgccctacaatttcactcaatcaaaagccatcttcttgagtcatcttctccgacaactcacggcatctaaatgttggttctgataaactcaaaaaatcaattaaaagttttttaatggaataatattaaaccctaaggagataatttatagggaacccaaagatttcaattaaaaaaataatcaaatcaattgaggaaattagctcttaaaattttcgtttgaatcaattgagcagattagctctcaatcagaattcgtttgaatcccaaaattcgttcgattcgagaaacccagaattcgtttgataatctcgtcattatcaatctctcaaatttaagaaataagcttagatttacctaattcatttgaatcaagctcgaaacccagaattcgtttcaaattcgcgatcttatctcaccacattctcttgcttctcagcctcaccaacccttctctttacagtttgatcggacttttatagagaaaatgatgaaaattattaatgagattaggttgtcaacgtctctgcaacaatgaaatcggaaaagaaaaaagattttgcaataaaattttagaaaactgtgaaaggtgtgaagggtgaaaacgtcaaacgacgaaaatataaatacctaaatctataagccatatgagatgtacctattttcacaaaaacatagacttaattgtaccaatcccataattgatccataaaattttagtatattttataatttttccataaaatgagttcattaataggatcgcacaaagttcaaaagagtagttggatttggatatgttggtatcagtttgtttcactttcagcttgtagtatttttctaacaaaggtcccacgatcaaatgagaaatctcattcttgtatataatcattataatttaaaagatccaggtaggctttcattatagtgtgtatataaatatatcacatcggcacatacaaaaactaatatattctggatacacaaaatattagagagcaaagacattggtaataaatcttatttgaaaatttgatatggcgtgtccacaaaatctttcttcttactagagattagcgatccacaacaattagttcaaagattagcgatcccctaattcattttgattgtgtttggaagcgtggagagaaaaattgtattcgaagcattaaattattttcttgccaatagattatgagttaccacttattaccaattgattttgagttgaaattccttataaaatttgatttaagctttagatgagatgtgtgtttgtgtctacggtgcactcgaaatcagaatatattcatttctaccatcgttcatgatagctcgggcattcgaactcttaatgccctaaaaatttattttcttcatctatttattatgttggatttagtgtgttcgatgtgttttgaatgagcgatacacatgtgtaccatcatttacggaaacttgaacgtttggagtgattgattaggtaagaatcctagaacaaaatgactactacaagtaacttttttgcaaaaaccttattttatgtatttcatcttaatactaataacaacttgacttttgttctaccttttcaatttcttattcactacaattttattacaccacactaatcacaagattcacaactaatggtgtatgaaccgttgtttgtgcttcaaactttgcagcgaatattcaaactttttatctatagaaaaagaagagtgtgggggcattaaaaggagctgtctcatagttggtaatgtcaattaagaagctggcaatacaatacatgtaggacaattcaatcatcgacccatttgaatagataatgcaacccaattatttcaccttattacaaagaaaaaaatacaccccaaaatatctcatcaataagcatattatactcatgatgacttttgttaattataaaaactaatgatgctaataaccaaaatcaagagttgataaaggaagtcacgtttggagattctgtctatagtgtttcgctggaggcgttgaaacagccctctttaacagctcacttcgtttcacattcctaaattcctctcaatcttcttcttacttaacttattatataagtctctgtttctctctgacaaaaatattccaccacaaaaaaaaatggctcaattcttagagaaggcaacttcggctctcagcgaagccaaagaatccgttacaagcaccgctgaatccgtcacggcttctctcactgatgctgagaaaaccgttaaccaaaccgccaggagcactctaactgacgccgagacaaccgttgcagcatctgttgaaacggtcaagaccgaggctgcagccgcaccagacaaagcgtctggtgtgtctacacaggtcggtattggtcacaaacttttacatgttttttatcgtcccagcaaaactaacaagacacgtttttaatttgaataggctaaggatgcagtggacaaagctttttctagaggtatagaaggagccaaatctttgcttcaaactttcgaagcgaagagcagcgatatttcctcaaagcttgttggaggtgttaccaatcttgtgagtggagcatcgagcagcaccgtggcaaaccgagaccttccagtatctacagacaaccaggtcaaagatttatgcaaaaccctcttttcttaaaatccttcaaaagaaaaagtttattgtctcttataccaaaagattgtaattctcatgatcatgttttaacaattgaatatatgtgttttgcagcctctgctagcgtctggtgaaaagacgccgtggtggaagaattgttgtggagttcttgatcttttcaagaaagatacttaagttaaaaagataaaaaaaaatgacaaattaacgaatttcacgagatgaagaaacagagcactagaagaagaaagaaccctcatccttttgattatttatttccttcctttttgattttgatttgagattgtgtctatctgtttttgtttgttttttgttttgttgatatcttgattgtttcccaaaaacttgtgtaagaacaaaaaaaaagaccaaataaaaagggttatttctttgtgattagtgttggattctcaccatcctcattggtcatcccatgagagtgtttttaaatattaaaataataaaagaaaagaaatgggggtgtctttaaatatgtgaataggggagattagtttagtgagtctctatggagaattgaagacactttagatcccaaaacgagggtgttttcaaatttaagatatgtttttttaaaacacggtatgacctataaggatgattaaggagctataaaagtttaacgaaacaaaattcgtaaacaaaacaaaaaaactgaagttcaagattcataaaagcctaccacaaattcttatcttcctgactctttcaacgcctcttccaccatattcatccttttctccaaattgagggagaatttgtcaatctactcattactctttcgccaattatattatgaaagtctaaaactattttaaaactattttataaaggaacatactgttattaattatttttttgtatataaataagatcttaacattgtcaaaacatatacatagctattagtatatgattcgtatattgttgttaaatataaatcaaatgaatatagttcaatacaataaatggcggtttggttctgcattggtttgaattcgaacttggtgttcgtttaggatgaatactttacacttcatggatacaaggttactaatagtaacttactgtataaatatcaacggtgaggtactttcggaactgaaaaaactatcgtcttgaattagcctagaaaaagttgcctattatatattacatgactatgttaaggttataacaagtggatataaaacacaaaagcaaaggaagtagagaaatgagatcaaagttcttgaggaggaggttgaagcttcaggcttgggagttggatgagatggtattctcccgaaaagccctaatccatcttcacttgttacgttcaatatcgattcactcgtgctgcaattgtcacactcgatcaaaaccttgtcatctcataaattcaaatacacgtgtatttatcaacttttataacatatcaattagttttggagagattttttaccttgtagatggaaagtggcatgaacctaaacctgtcaacagagagaaatctttcatttagatggattctttctcgacatacatatatgtgacgaaaaatattgacatggaaacattatcaacccttgtagtttagatatgtagcccgatcatgtggaaaccgttagcattgcacacagaaattactatatatccctgctactatttggtcaacaaaaaaaaaaaaagctcttttatataagcgagtgtataaagttttcttataatgaattctaaatttattttcagatcttaagtcttaatatgagtttgtagtgttcaacttcgtgtatttaaactattaatttattgataatagttttgtcaataagatattcctacttattggatctccgtcctatagcgtccaccatcttaactaatacattgatctataatttgttttcccaattgaccaattaactaaagtaccatcactattagtttattattatcggtttgttacacttgacaatatgataaaatcactaaactccaactagtaacattaaaaattatttagcgcaacatcaatatttaacatttagctagtacactagctaatcctacaaaatgtaagagttcaaaatcacaagttcgaacacaaacggtagagagattgactaataacctgatttgtttccgatccggaagaattatacatttaaggtctggttagaaaagacatatattattttgcaataaattttaactagaaatataagatagaatgactaacttgggtcagcactgatagtgatagcagttccatcaaaattgcaactactagggattggattcttctggtaataactattgaaggcaaaagaggcatgtgctctcaacgagttggggttataacaatttcctccttcttgtatctcagagcagtctgctccaccaatcccacatgcatagtccaaagccgcttgtaacgccatttttgcaacgttctctctagcaacgcaccagctctgatcacctgggtaggctacaccgtgtggtgacgatggaatcgttagtggcgttgtggccaccgcggaagcgtcagagtcggagttagggaccacggttgttggtgtggtggttgggtttgtggctaatggtgtggttatgtctttttcttcttctattggttcagtaattgcttttgtacctgtcaaaccatagttaatgtttttatttattgattaaggtattaaaaacagtaataatgatgtctaagtctaagatttggttggtaaagttagaacattaattgtcatgtctctaacatttgtttcaccaatttgtaatttatgtaagtggataaaaaagataaaccgagttaggaaaacaaaaagtaaaaaaacgaagaccaaacctcagaaaccataaacaaaaagacaatagagaatctttgaactgaacaagaaaaagtaactactagaatatttgcaagcttgaacaccacatcaattcacatgtgtaagaaccttttttttttgaaattggagaagaattaccttttcagagtattgataataacgaaaataaaaacattaggaaggaaaataaatagaaatggaacgttaggaaggaaaaacattttagaatataaaaacaaattctgctgaagaaaaaacaaaactaagacatggatcagagttttaaaaacaacaaaaagtcctataagacatagattaactttccgaatcttttaaatagcaaattcattaaacattataactttgaattaaatagataaacatatatatatatatatatatatatgtcttagacatagatgaacatttttacataattaattacaaataaaaaacaagaaaaaaatattgtgttatcaatttttggttggttttccattaaaagaaattcaaactatgggttatatatatacttgaaaatttttggaacaaaagttttcatcttctttgaataatgggttagaaaagtaacctgagaagaagaaggagagaagaagaagactggttactaatctgaagcctttatccattccaaaaaaaaaaaaacccaaactcttgtcttttgtcaacaaatctttcttatcaactatatatagagcgagatgggggggagagagagagagatagagatagataaagggaagctttgtgtttggaacttgagtttatggagttgaaaaaggaggcaagattgctggagaaaccaagagagaaagagagagagagagagagtagtaatgatttgtttggaatttaggttttatgggcaatgtatagtgtaatgcgggctgcttccagtgagtgatgttagtaatgatggtttttctctcacacttttgattcttctattccctggttcctcttttttctttactttctttcaatcacaattaaggacttttccattagttttctttctttcttgaagctctacataagcataaataatttgccgctaacataagcataaacaatttgagtagtgggcctcacttagctagctacgaattatataaatttaactaaagatttaaacataaacaacaacaaagaagtaaagaactatatatttaattaaaaggtagaatttgcaaaatggtaatatgtttcatggtaaccgaacccgcacagtccagtaccgtttcaatagtaataaaattttatgtatatatatacacatatatttatatatttttgttattattataactgcactttatgtacaattgaaccgcagagttcatagtcaaaaagatgttaaattatgatacataaaaagttaaaacaacaataccgaatgaaatgatgaaaaaaatagatttcatactcattacatagccacaagttcagtaactacaacatttttagctaggattccatacgtacgaaatattgataaggtcgaacacatgatcgatcaaactatgccatccgagaagattgcacgtctataacttcaaccacctgatcaaaattgtcatttttttgttttacatggatgtgaattttattgaaggtaactcctccactcaatatgttacgccagccacccctacaaaaacaaatgtctaacatgaatgagatctacactcttaagtcttaaccatgtttgacttgagctcttcgctcttcgctcttgcttgctaaagcgatttgcattgttgccgttagaaagaaaaagaaaaacaatcttcattattgaaataacaaagcgaattgaagcaagaaagtttgatgtaataccgaatttgaaataaagaaaggtaaataataaacgagtaatagaataatactctttagtttctcttttacttttgaggaaatatagcaaattgattgatttgactttaagttgatataggacccaaatatgttacaaactcataagacttacttttgactaatctcacaccaactttttgtgtttattattcacatttatgttgttgcaacctctatctatagcaatatttaaaaatattttagaccttcattattaaagtttgtatatttatttgcagtggatgcggaattaccttgttgaaaagttgcggtaataattgcattattataaggtaaaaatgtgcatttagaaaaggataaagtaaccaaagatacaactttcggtgtcgcaaagtaatgataagaaaagaataaaattggttcactgtttcttctctttatttgagtattaataaggtacggaatgaggaacacatgattatgagagcaagtgggggcacatatttgttagcaacaacataggaaatgaaaaatagattcatgtctataaatcttcaattattttcaattttatcttagtaaataataagtcaagagtactgatttaagatccctattatccaatactaacaaaatgtgttaaatcgtaagccctaaaaactctatgatatttgttatagacagagtcaaaacaaaagttcttaacctcttatgctacatctttggattctaccaaatcttcttgcactctttaaaaacgtattacaaaaaaaaaaaaaaaaaaaaaaaaactcaaatgagaatgcaggagtggctagagattttactgattcacactcttattgattcatcatctttatcaccacaaagactcagagtaatgaatagaatcatatcatcacaaggatcagatttgatcaaacaaaaactctctcaacacacttccttcttcggcatcaagctatggatcctcatcacagcttctgcctccatagccttcctcttagttctgataatttctgtcctcctctgtttcatatttcacaggagaagatgtagccaagaaccattcagactaagatcaaagctttgtctacctttatcacacattcccttaactaacaaacaacagattccttataaccgttgcggcgacgatatagagagccagagaatctctcaggttggttggtcctctgctcgtctttcctactacacacgcagcttctcctctaccggcagctttggaagcttcaatgtgtttacgttcatggagatcaagaacgtgacagatagttttgcagatgataatgtgattactaaaggagattcttcaacggtgtatcgcggaatcttgatgggtacagtcactgttgctgtcaaacgattccttccaaggtttttacatttttgcttgatgtcctcgtatatcttagaatcttaatattttgatctgagataaagagtaatagcaggtatgaagataaagatttcattacaaaagctgagatgattgcaaatgttagacacaagaatgttgtgagactccttggatactgcatagaaggagatgagaggtatatagatatataacctatgatgtgtgacttacgttaaaattaatttagactcatacttaagtctgtataaattttagggttcttgtatatgaatacgctgagaaaggcgatttgcacgaatggcttcatggatctgcaggaagaaatcggcctctgacttggagaaagaggatgaagatcattcaaggagtagcaaaagggtttgatgatcaaaccacattttggttttcttgtcttcttttatgcatgaatcattctgatggttaattattaagtttatgttctgatcagccttgcgtatattcacgaggacatcgaaccaaagatcactcatcaagacataagaccaagcaagattcttcttgattatcaatggaaccctaagatacttgatgttggattcattggtcacagtgatattccaactttgattccttcacctggtaatatggatgagaaaatcgacgtttattcctttgggaatatgataatggagcttgtctctgggagagtctctgtagaccaaagttcaccacatgtgagagtgtatacacaatacataatttaccaataaaaaccatttttagctaactagaaacactgttgttcttggcaggtttatctagtggactggatcaaagagatggtggcaaatcatatgatagtagatgttcttgatcctagtcttcccgaatttcctacaataaaggaactcaaacggattgtgttgatttccctgcgttgtgttgatcccgagctaaaagagagacctaaaatgggagatgtgattcacatgctccaaccacatgacttgctgctgaataacaatgtaataaaactttttgacattcagtttcttgttccccaagctaaatagttatccttactttgttctttctctgtttccaggcaatacagaaggctcagaagattacccggtcacatgaggtttctgcaataagtatcagacaatgagtcctaagcaagcaataaaatgattgttaatataggatcttctgctttgtattaactaaattaagggttccttttaatttaggtcacagcaggctcagctgtattgattgtgttttgcatcctttccaactttgttatatgacttccctatatatcacatgtgttgctattgatgcaggatagtaatcaggaagataaatttcttgaaccaaatctgtataggaacactgataaaatagaaacaacgattttcacaatcttggtttccaaggaacttgaataacaataaaaactagggatagtataatgaagttacaaatttattactttgacccttcttttacttaaatttccactgttgtttttctttttggaaaattatcttttacaagtttttttgcgtttcattaattctatgttacgaacacaactttttgaccaatttataaaatcggtgagttacaataaccggtagacgagtaaaccgggattttataagtgctctgaagatcaccaaacaatctctcctcacgaagatcttcagcttcaaggacttttaaatcatcgaatctctctgtaagttacgatctccgactgactcttactgggtaaatttcgaaaacttgaaactgggtgtttccgaccgtcgaatcggattcgactagatatgaactgggttcaacgaaaaatctacctttacaacgtcaccttcgggctttacatgctcgattggtgggaacgatacctattcagtatccttttctctttgatctatttgaactttttttgttgttgcgaatcttatcttattcggttaaaaggttgaatttttatttgttcagcttctttagctgcgttatcttttgttagaaaagtttaattttttgagattctattctggatttgacaatgtctatgaagtttcaaatttacaagttttgtccagcaaaaacaaaaaccagagctcttgccattttccttaactctgtttttttctttcagattctttagtgttaatcttgatgtggtttattctgtacaatggatctcgttacttttccgagctttgcaagaggtaactttaatggtcttaatgtatagctttagtttgatttaggtttgggttttgtcaccatctcaaatccttgttttgcttatatgttttactagtttctatctctagttagtgtgtgtatatgtatctatgttctattgattaaagatatcaagagggtttgtggattttacatcacatttgatattctatatcatccgattgttaatgaactacattgaatgttatgttcctttgatctctgtgcttataacggatttagagggttgctagagtttgctctatcttatgcattcaattctcttaacacagagcagagcgacttcaaacagattctttggggatttgaacttaggttgtgtgttaagtatgctcagaagaaacatttgaaatcactttcttgataagcctcttgcgttgttatgcactgcttaattatgttaaatccttcttattccacaggcatctttcatgaaaccaggtcataatcatcacgccatggaatcgtgaaacccacatggttatctgagacttgcgccaacaaactcctatgttctgctttgcttgcacctccttctttgccacgattcctgatcatgtaaactgttcatagatcatttattcctatggttattttggaatggacatcctttgttcgattctatttcctccacttcaaatttttgacacagggccaaaccatattacttgcatcttttgatgtttagagtccataacctcaaagtttccaggtgttttctcggtactgttagtaagagaccatgtccatcagtgtttctaatgggtttctaatctaaaatcctaaagaataaaagtccaaaaataaaggaaaacccaataaaattgttaggatcgttcctattttaggatttttaggattttctgaagtgtttagaaacagtgacgtggctagaaatgataggatgaaaatttagacaaaaaaaacaaaaaagaaaaaagcgtgtttctctttcctcttgtcctttctcttttcttttggttctccgacgaaaattaggtgattccaatcgatccctttcgattacaaacttcggcgtatcgaccatgaaatcgggagacaagagccacatgtactcaattttcaaccgctatgtactcaattttcaaccgccgggatgatgatcgacgacgaggttgttcactaaattgattcttcgaaccaaatcgaaaggagtggcaaaaagcttcagaaaagagtagggtggaggctgcttggattaaagagaagtatccagatagaattccggtgagtgtctctcttgtcattgatcgatcatacaataacttgcttaactttcacaacaattatagccttttctctacgcattgtttggaattgtggtgttctctacgcattgttttaaacttctgttgtttaagaaattatagaatatctgcataaagtatgttaaggtttatacgtttattcacatgaacatgaccatgcttctgctatcgaagaagaattgcaattctcatggaaaagcctctgttttttatagtgcttagtaagtatagagactagtaactagaatattattagattggtttatgcatttcttttatggcttttgatgaacaattggtccatatgccattattttcggttatatggtccttatgtgacacattactgttaagtgtttctttctcatctaaacgttgaagagtagtttgattgttgtattgaccgttaagcatttgtactcttactgaaatcttgagagctgtcattttcaggtgtatgtagaattgcagactacattctttaagttcttgagcttggaacaatacttttctcactctacttgtttctgcaattaaatggtaataacaatttctaatgtcagttaaaaatctttcaagttgatttttgtttagctttttctattgaggttcaaacttgtaagcacgcgattgaaaccaactgtagaatgacagatcttgtttgttattctgtctttatgttactttgtgtcatcttctatatacttttacataccttacagggccgcttagtgatcttgaaatggctttaaagaacaaacttatcactgacatgttgtcaaatgcttgaatggtgccttttatgtcttgaaagttagtctttttgtgtcggttaatgcttcttcacttgtttttgttctgttcggttatgaatcttattatcttaagttgtttgtgttctgttctaaattggtttcattgtgctctgttctaattggtttgtgttcgtgttcaaacttcaatagattggtttgtgttctgttctaaatgaatttcaacttcgttttaaggatgatgtccctgtcgagatgcaagagttcaaggaagcataaatagcaagcacatgcaagtgttgttctgttctgtgtataagtgtataggctatggtcgtgtgaagatgcacttgagtttgtgtgtcgaattttgtgagtgtatcaagttttgagagcgtagagtctgtgtcaagttttgagagtcaaatgtatcccaaacactttcacatttttttcaaaatttttttttagttttattagaaactcacttaaggatttttttaatggaccaaaaatttttcaaaaactctacaaaatctctaaactacaaaaatatcaaaattaattaataaaaaatacatagaaaccttacttagaaactaaccaatgtggttgctctgagagtactacaaaaataaaataaaatgtgtaatatacaaattgcaagagaatacataacataacagagaaattcatatgtacagtaattgaaaatcgtcgagtaaaccaattttggtttggataccaattcagtttttggttagattcgggtaattaaattaaaccactcaatgaaggacacgtaagttcttcacgaaccacatctgttcccttaaaaaaaaatctccaagtcccttgcactattctcctctctttctctccatcctccatatttgcagagctcgagattctccttccctatacaactctcatctgtaatcgatacaggtttgtcttctacctcttctctttggttagattcttttataatctccgtcgctgcataactctgactgggttttcttcggcaaattctgatttcgtcgctttgtgttagttttagttccttgatttctaattcactgaattaagaactcgaagtatgtttactgttcctttgatctgagggttaggttcttgtacttgtaagaaacttgcttgttctgtctcatcgttcatgggatttgatatatcatctaattaatttttcttctttgatgaattttcagatggcagcttcatcagcttgtcttgtgggaaatggtttgtcagtgaacacaacaaccaaacagaggttaagtaaacatttttccggcagacagacaagcttttcttcagtgattaggacatctaaggttaatgtagtgaaggcttctttggatgggaagaagaagcaagaaggaagaagagattttctcaaaatcttgttaggaaatgctggggtcggtttggttgcaagtgggaaagcaaatgctgatgaacaaggtgtttcttcgtcgaggatgtcgtattctaggtttctagagtacttggataaggatagggtgaataaagttgatttgtatgagaatgggactatagctattgtggaagctgtttctcctgaattgggtaaccgggttgagagagtacgtgttcagctaccgggtttaagtcaagagcttctacagaagcttagggctaagaatattgattttgcagcacataatgctcaggaagatcaaggttctgtgttattcaacttgattggtaatcttgctttcccggcgcttttgattggtggtttgttccttctttcgagacggtctggtggtggaatgggtggacctggtggtcctggtaacccacttcagtttggtcagtccaaagcaaagttccaaatggaacctaacactggtgtaacatttgatgatgttgctggagttgatgaagcaaagcaagatttcatggaagtggtggagtttttgaagaaacctgagagattcactgcggttggtgccaagatcccgaaaggtgttcttcttattggtcctcctggtaccgggaaaacccttttggcaaaagccattgctggtgaagctggtgtgcctttcttctccatctctggttctgagtttgttgagatgtttgtcggtgttggtgcctcgagagtccgtgatcttttcaagaaagccaaggagaacgctccttgcattgtctttgtagatgaaatagatgctgttggtaggcaaagaggaaccggaattggtggaggtaatgatgaaagagaacagaccctcaatcagctcctaactgagatggatggttttgaaggtaacactggtgttatcgtagttgctgcaaccaatagagcagacattcttgactctgctttgttgaggccaggacggtttgaccggcaggtactatctgattattacacattgatatgttttgtaatcctgtactactcctagagcttgtgcttacttataatttctggtgcaggtaagtgttgacgttcctgacgttaaggggagaacagatattctcaaggttcatgccggcaataagaagttcgacaatgatgtttcacttgaaataatagcaatgagaacacctggatttagcggagcagatctcgctaacctcttgaatgaggctgctatattggccggaaggcgagcacggacatcgatatcatctaaagagattgatgactccattgatagaatcgttgctggcatggaaggaacagtgatgaccgatggcaagagcaaaagcttggtagcttaccatgaagttggtcatgcagtgtgtgggtaagtgagaaacatattaaaagcctgtctgtatattattactatcaaaaacttactttaaagttataaactttggttttttacagaacattgactccaggacatgatgctgtgcaaaaggtaacgttgataccaagaggccaagcaagaggtctgacttggttcattccatcagatgacccgacactcatctccaagcagcaactctttgcaagaattgttggtggactcggtggtagggccgctgaagaaatcatctttggtgattccgaggtgactactggcgcagttggtgacttacaacagatcaccggtttggctagacaggtacgcgacacgttcagcttcacattagttatgctggagcctgatgataagtttgatcttttactagttgatgaaactgagtgtttgagactgttgaatatttttactttgcagatggtaacaacatttggaatgtctgatattggaccatggtctttgatggattcttcggcacaaagcgatgtcatcatgagaatgatggcaagaaactccatgtctgagaagcttgcagaagacattgattctgcggtgaagaaactatcagacagtgcatatgagatagctctaagccacataaagaacaatcgtgaagccatggataagctcgttgaagtgcttctcgagaaagaaactattggcggtgacgaattcagggcaattctttccgagtttactgagatccccccggaaaaccgagttccttcttcaacaacgacaactccagcatcagcaccaacaccagctgctgtctaagtaatcaatctgtatacttgtgatacttataatttttctgtaaatttatcttcaaacttacactctagaaatgtgatactatctcaaaatttagtaacaagtaaatgtttaaaaaattgaatttgtaggcttgtttatgatattgtccagatttgcaacactcaaaccgaaattcaaaagtattttcaagtagcacaagcagaacaccaaaaactgttatggaatcatgttctttatacttacaaacttatgtacatttgcttacaattaacctcaaaccattagtccctaatgcttcagagtctttaatccaacaccatcatcatctctctgttcaatgaacatccaagaatagtagcattccagagctaagcagaaaacctgaaaccaaaatattctaaaagatcaatgtttgattccaaatcagtaaatagaaaccgtaaagaagcaacatttatcaaaccttaaaggaaacgttacgcattaaatggcttcacgccacttgcaattccatcaccagctctctcgttctgctctttcttcacccacaccattgtagaagaagaagctcctctcggcattggccgattacgatatctccatttggtttgtgtcttgagagttttggcttctcctctattgatagagaagttctcaaactgtgtttctatggccattgatttggtaatctctttagatttggtcgctttcatccaataaactggaaccacatctttcaccggagtattattctccgtcacgacggactcaggcggcacgattgatgatacacaaccgcaatcgatgacatcctcaaccacagctccatcttgatttttattcgtcttgctattatatcgtttcctccaagctcccttattcttcttcttcttcttcttcggtaatccatccgccgcatcttcacctccaccgctctcgatcgccaccgtgacttccggtttctccttctcaacgaatcgtgcttctccgccgtctatagattccttttttctcccaaaatgcttccgattacttcgattcatacgcttctcctcctccgctttcttcagatcttcttcctctatctttttctcttcctcagcctgtagtttccgtcgtctctcttcttcttcctttcgcttcttctctttctcattgagccaacgctcctggagctgaaggatgctgatgtagttagccggaatcagaggaacagtctttcttttgccgtatgtgttcttctcctccattgaaatcatttccttcacacgcttcacaaacaaacctcgtcgaagctgaaatagtgaaaagcgtactgtagtaataaaatgctgaaaggaaaagtaaaaaaagagaggtcctacgcaatagcattaactttttataccgcacttccttagaggcccattggctggcccgtaacttcctttacttttttgagattttctgataattttgttgtaaagttcacaaaacataattaagttggaagcacttaagttcacaaaacattctaatgaaatcatcttgttataattgactcaagttacaaataatatgataaaacagtcaaaattaaaaaattaactaccataaacatgtaagattctaaaataaatataaatgttttattactagattcaggtgttggaagactaactaaaagggaaataaatcagacacatagagccaagcaacatttattactttttatagtatttatcattagagtaaagcttattttattaaaatcaaaccttatctctcacacacacacagaccaaggccattttctaagcaacttgtgcgactctccttcgtcctcatctgccaaaaacttcgtacgagtcgctacttctctctctatatataaactccttaccactctctttttctgattttttgacgttaagagatagaaacagagagagatagagagatagagttatggctttggcgatgatgatccgaaacgcagcttcgaagcgaggaatgactccgatctccggtcatttcggtggtttgagatctatgtcttcatggtggaagagcgttgagcctgctcctaaagatccgatcctcggagttaccgaagcttttctcgctgatcctagtcctgaaaaagttaatgttggtgtggtgagtctctctttctctcactctctgttttcccctgcttactacaagatcttacgaatctatgaaattacatcaaaattgaggtcttaatcctatggatgaacatggattgttgatttggtgtttgcatggtggcttttattttggttttgatgaagctaatctgtgtttactttacttatgtgttgaattggctaaatcattttaagggagcatatcgtgatgataatgggaagcctgttgtcttggaatgtgtcagagaagctgagaaaaggcttgctgggagcactttcatgtaagagtttctctttctctccccaaatgatctaactttaatgcttctctgttcattgacatgaattgattgtcaagttttgaaatcttcttgtacagttggtgaagttcttgaattgtaactgacgaaaagtatgtgtgatttgttgacataacttgttaaatattgtaggtcttattagcccttttgaatatggttgtgtttgactatgtggtgcttaatttgtatccttcatattaaaaaagatcaacatcagcaattatctcattgtcccatatttcaccagactgatctgagctgtctttattgtattaatcatctaaagggagtaccttcctatgggaggaagtgccaaaatggtggacctaacattgaagcttgcctatggggacaatagtgaatttatcaaagataaaagaattgctgcagttcagactctgtctggcactggagcctgccggctctttgcagacttccagaaacgtttttctcctggttcacagatctacattcctgttccaacctggtccaagtgagtttcctacagttgatttgatcatttctcatgttaacctcaacggtctactttgtaagtgtggccaagcttcttttgcttcccaaaaataacatggtttatgttttctcttatgaatagccaccacaacatctggaaagatgcacaagtccctcaaaagacatatcattactatcatccagaaaccaagggcttggatttctcagcattgatggatgatgtgaaggttagcaaagaacatcttcttcaactagcatcttttttacttcttcttgttaacatcctaattctgttaagcctttttccatagaatgctccggaagggtcattcttccttcttcatgcttgtgctcataatcctactggagtagaccctacagaggaacaatggagagagatatcacagctattcaaggtgataactcatcagtttcttatagttatctgtctatcattgactttatttctccttgatcagccctctgcagactaacatcgagttctcatttcaggctaaaaagcatttcgcattcttcgatatggcttaccaaggttttgctagtggagatccagcgagagatgccaagtccatcaggatctttcttgaagatggtcatcatattggaatttctcagtcctatgcaaaaaacatgggactctacggccagagggtgggatgtctcaggtattcatttttctcaacaaagaacatcgttttcttcctacacgaaggaaaatatggaaattagaaagtacagatatcagcattttaaaaatttggattgtaggcgtcaacaaattgtatgaaatagccatcatacaggttcatttagtgatgaagtaaaaactgaatatgaacatgacaactttgtcttctactgcagtgtgctttgtgaagatccgaagcaagccgtggctgtgaaaagtcaattgcagcagctagctagaccaatgtacagcaacccacctttgcatggtgctcagctggtctcaaccattcttgaagacccagagttaaagagtctgtggctaaaagaagttaaggtaacatttatgaaaaaatgctaattctttcattcaattaccttatatcccatgttcactcttttatgtttagtaatcaactatggaattaaaatctgataagccatatgtaaaatctgtaacaggtcatggctgataggatcatcggcatgagaactactttgcgagaaagccttgagaagttaggatcgcctttgtcatgggagcacgttaccaaacaggtaactacaacaacaaaataggcttcttttgtgaaattcttgttatttctctcctttgactcacacagtcatatctttatggtgataacagattggaatgttctgctacagtgggttaacaccagaacaggttgaccgcttaacaagcgaatatcacatctatatgacccgtaacggccgtatcaggtacttcactttctcctgattagaaatctttcagctcacattcaatgcaatccatttcctaacatcaacatgcttaatttcaatgcaagccatttcctaatcattgaggctcttgatgtttggttgcagtatggctggtgttacaacaggaaacgtgggataccttgcgaatgctatacatgaagtcaccaagtcatcttaaatcatttacttacatgtttcagccaaacatacaaattttgtttgaagagtcaataagacaggaggctagatttgtacttctgcaattggttttgtgggaactgaaagtttacccataaacagtaatttattagcgcattttttcgttagctgggcaataaaagcaaagcctaaacgatggatttttggatatacaaaattcggattgttttctttcttctcaattgctctttttgtgcttgtttcctttcaacgttacaatgccaatgctggcaaaattttatcctcaagctcattgatttcaaatgtttttagtttttacttttaccgtaggcaactttagattatcatgatttcatttcatcatttcggttatttgacttgcagtttggaatcgattttgtttcatttcaaggacaaaaacatatacaaatactgatacaggagaaaagtatctctctacaagtcagtgaacaaaaagaatataataggacacaatcatcgcctcctgatttctcaaaaagctgaattggccacgtctaaggaggagacatcatctcttctcagaagctgatacttagttaatcagagagaagtaaatctccctctccttcattccataaggcggcattttgctctggaaaagcatctcgagatcgcttttctagggtccagcttgaaatggaaagccaccattcatctgtcgcctcacatgctctggtattagcctgttgataagctccggtgaagccccagacaactgtttcaatagtcaaagagagagctaacagattgagtaactgtatgcacattcagttatgtttggttgaaggaaaagtgattttggaatggtttaacatacctcttgtttgaagttgaacaacggtggtagaggtcggccatttggaagacgagcatttggctcacggagttcattgaaaaacggatgcgcacatgcctcgagcttcagacggcaaacaaacaagtcagttgaaaaacaacatttcactccttcattgaacagtgtatggtccaaagaagccagagagaaccactgtaacaattaagagtacttggtttagaaataccaaccgcagtgcaacgtagacttggtgagtattgaagaagccgagatgcaaggtcaatggcttccggaggcatccgcttgtggaaaacctggaggtcatagagcagttgtgcaccgtgttagcttcttttccatgaatgttgtttaggtagagaagtaagcaattgtatgattagaaagaagttcgaaagtgacatgcatatatatatattaccttatgccaagggtgggctttgatttgtgggaatctgaagtctgtgtagtttgggttcatgcaccggatttcttcgcgagttggagtaccaagaacctaaaccaacacagcacatcatgagcacagacaggaaatgacgccaaaacaaaatataataaaagaagagttcacctttatgatctccactagctggtccacagaattttctcccgggaataacggctgtgaagataaataataccacattgtttacagaagattttggagagatgctttagttctcaagatactcaacaggttagaaatttacactaacctgcccaagaagtagctctgccagaacacaaccagcagaccatatatcaatggatgatgtatactctgtggcaccaaagatgagttctggagctcggtaataccgagagcagatatatgatatgtttgcttcacctttcacctaatataaaaagccaaatgttgcaaatatcaggctaacagagaaatatctgaaactgcatccatacttatgtaaattacttgcataatattcacttaattggagtttttaactactgcatgcaaagacacaagcacagtggaaaagacaaacaacaaatggggtaaataaaagtctaaacctcttaccagtacttttgcacttccaaaatcacagagcttacactgatgggtgaggggatcaacctacagaacatacagagaataagattacaatctagtcaaggttaccaaagacaaaacccacaatagatcaacgtaccaaaagattttgtggtttcacatctctgtggcagacaccaggagcagtatggatataagccaagcctctgaagatctgcacaacatattttataaacagttttaggataaacacaacagagtaaagagtatttattggggaaagagtagataacaatgcatacttggtatgtgtaaagtttgacatagaagataggcatccgctggtttgaactagtatagtgcttcaaaacccggtacaatgtctctggtacatactccataacgagattgaggaagagctcatctctagtcgttgtagagaagaaacaatgcttcaaggaaaccacatttggatggtccattagtcgcattaattgcaactctcggtttttataacggcgatcttgcaaaaccttcttaatggctactgattctccagtttccaagcattttgcctagaatggtaagttaacaatctgatcagaaaggaaagacaaaaagccatttgcctgtagacagtgacaagcacaatgatacctggaatacaattccgaatgatcctgttccaacaacacgttcggccatgtaactaatggtctgtaaaggccagagggatgaaaacattagagagtagaacttagagttggaaaaaaggagccacaaagtcaaaagatgtaaaaacctatttatttatttgttgaatttctatagattaatccaaaccttaggtaaccttatacatggtagtgtgctcgagcaataactatgatttaaatcattacaaagatttaataaacaacagaatccaacctgtttaggttcaccatttttgcctccaattgtagtagaaattatgtgaccggtaacagcatcatttccttctataacagcagcagacatttcctaaaatcaaacgtgaacatattattacaggagttaaaactattcttgtctacaaagaatgaaggaaagtagtaacaattagtgtttcctccgatgtatattgattgaatagacaaataattcaaaatattcgaatcgtttttcaatcagttctatcaagtgtatgaaatcttccagaatataaactttcctttaaaatagcattcaaatctaagaacagtcaatgcccaatttacagagaattcaatcatgtaagataactaaatgtaaatctaaatgatgtcgcaagttcctgttgaccagaggctaacaaaattcagaaaacaaatgcatactactatactagttgttacaggtaaaggaaagctaaaaaatgataactgtaacttcaagagtagagaaagattaagatgtcaaccattttgtggacataagaaacttgtacaaaatcaaaagatacaatcagacacaacatggaacagacactgtcaggtggagaaacaaagcaaaagaacataaaacaaaagaaaagagttcagaatcaatacagaatgggccaagaatcatataatctaaacgaatactccaaaaactgtcaggaaaaagaagaaaaaaaactcgaagatacacaagtactttgtgaagtcaaaagtgttaaatttaacacccaaactatgaggttacttctttagggttcaaagggttattactagaaaatttctgttatttaccctaatttcttctttagggttcgaaggtttactgctactaatcaaaaacagctcaagagatcaatcttcactacaaaaaaggttgaaaatttcagctgaagaaaagtaaaactagctactatgaagtcaaaatgcacaatcttcaatgagctcaaatcaagaacgctgactaaaaaggaacacagatcgattgactaacacatcgaaacaagcaaaatccgagctagatctagaaaacccacaaaacgaaaattgaaatacattgttcacgaaagaatcaatcagagagagagagagagagagagagagagagagagagagagagagagagagagagatacacacaaacgtttcaagttataagagaagaaaaaactaaccttgtcgttgtctatatcgggacgacgtttcaaagaatctccgccgtgaagatgcggcggctgaggagctaaagacggaggctgaggaggccccaatggtatcgaagtcatgtgcttttacagctctaacttctctctctcactgaaagagtaaagactattttgttctctctctattacctggtgttctgtctaaacttgagaaaatttttaaagataaagaggaaacccacgcgtaagtttagcgcgtgattcttacgctccaatgaaacactaatctgtttattaagtagtcattatttaataagcacagtgattggtgaagtgaaaagtctgataactccgtaataataccataatgcaatttattgtggagattactacattcacacaatcagataatttgggtaaactaacaacaactactctctttcagattaatagttgttttggagttttaccacaattttaaaaactctttaatctatctactaatataaattgtttacagtattcattctagtttttttaacagtttttattcgctatcggtaaactctttgaatggaaaaatattggcttacgttacgtatgtgttttctgaatcttgaatcttctaagtttttgtcattttagaaaaaaaattggtgttctctggagccagatggctacatatttgacttttaatatttggtccaatttaaaggatggataaaagtcttagaataaggggagtggacttagcacatggacgaatgacgatcataatcaatttcttggaacattttgtttaataataactcgctatttggattccaacgaccaacactatggacaaataacatcaaaacaatgttaaaatatatacatacaaaaactatgattgagatatatttttctcttgtatacatcatgacatgatatatttacgtcgaaattttcttttaacatgatatggtgataaaattattcattaagatgattagtttgtgcagaaaaaatacaaacgatggaactattaaagtagaatgaaactgatagtaggatgatgcaagaatcggatccgatcatactaatatcaaatagatatttgattttactttagcataacgataataagattaggcacatgttgttctttaggtaatgcctagatgttctaagcaaattggtcataaattcaaatacgtacggaaacagtacccaagtgatatatctacttatctagcaaccccctcctcctccaccaccatcaccactgcaaccgccaaaaacgccacctttacagcagcaacagcaacttgaatccttcttcttttccttctttttggagcaagcaaatacggccatggttacaagtaacaacgacagaagaaacatgaaaatcaagaacaaaacacccccaaaagcagcagcttctttcatgtcaaactaactgataaagaaacctctcactctctctctatattgttttttaaatttctcttcactcatatatttgcatgtgatcttccatgccactatatatataaagagaataagagatgaaatgtgaacattttcacaccaatattgtttcaataattcctctagtgactaatttagtcaaggtattcaattcaattcaattctgcagctttcaagtttcctttctagtgagctctatattttgaaaccataattacaaaagaacgaaaaaaaaaagtctattagtagagaataaagaagcagtgtcacatggaattattgccatgaaatctccgttaacatgagctgtacatcacttcaacaagaaacctctccttaagtgccagacaatatttaagacatttatctccattgctttctctttatcatggaatctttttgattcagatttacacaaatagttaaagacaaaatacccaaactttattggctcatcccttctttattgttgaaaatttacatgtaatttggtgtgaaaaattttacagtttcttcattaccaccagtgagaattttgttttggtcttgctatgactctggtatagggtttagtgtttcctgaaagaacaaaacaggatcaacaagtattaacacattttgccaagcattgactttgaaaattaagacacatttgtgaaagtattggacgtttcttttttttttttttaccttggagaagcacacaaacccttgctgtgtattggacgttttgaccatagtttcccactttggattagcttgagtcttggtaaagtgattatcatcatcagtgccaagagactgtaaccatgcgaatgagttgttttttggtggtattgttggtaatgtacgctttaaccaagaatctgaaggagcttttggtaatggtggtggaggaacaatgagataacttgaacgatgatgaagccttgaactttcaatatttgttgtgattacttgcaactgaacttcaagatcaatcttcttctcctttgtaatctctaccacatcggattctggcagtgcaacaatagcttgatgatcaggacattcttcaactttctgacttgagaatttagtgaaatcctcatctctgttaccattctcttgctcaatgcttttaggctgcgagatatcagcttcttcatcttttacaggaacaatgtctagtgaaggagactctttcaatataggctgcttcttggactcttcttgtaccttcttatctactagatgcacaatgtctacatacagagttttctctgccacaggagtctcggatgaaggttcccatgtattctcatcactagccaagagctcaccaaagtttttactgattttactgcgtgaagcggtgccaacgttctcgagtttctcttttccttgtggtatagaagatactgataatgactcaccttgagaagacccttttgcaactgattcaattagcttcaacttcctcttatcttcattttgctatagagagaaaaatataaaagaaatttgatgagagaaaaggtctcagtgtaatgatgaacgaggtggcgagaaggagagggaatcaattaccttgttatgagtttcattagaaggtgcagaatcttggtacttagaccgcatacgacgaacagaaacagctctttgttgctgcattctcacagatggaaccggattcaatagtcccaaagagcttctcaagcagagttgagggagtaatccacaaacaccagacgccatcatgctgcttatatttccatcttcctcttcttgatcaggcgaatgacgaaaccgatacggattttgctccactttgttctgtttcttcttcatcaactgcttcaccggttcttctggtttaggtggtttcctagcaagatgtggaggtgattctgaagtcaaagctttagctgcaggcaagaatctccccatcattagatcctgagtttgtcgatcagtcgataaagttccaaatggctctactagtatccctgaaccatccaaaccactcgcaccactaacagcactacagttaaagaagaatgactcagttcttgaaagtgtatcagttgcatcaagataagtaccatcactatcatcatcatcatcatcataccgagaactattactctttgcatcctccacaagatatttatccgaagacgatacagttttggtctggtgatcagctccagtactttcaggtttcctccctaactctactactcgctctctaccaggaggaagctttggcacaaaatgtggctctacaaaactttgcaaaaccggtttcctttcgtcttttggctttccaggcttatgttcccattgaaaaggaacagttcctggatttctcacaggacctgacttgatatcagacttgtaaactggtggagaaggaggaatcatgttggttactgaatcaaaagatcttgttttgctctcagattctgaagtttgtgtaggccgtctaatggatataagcggacggttgaaatccagttgcttctcttccatcattaagctccccattaacattctgcataatcaaaatcatcattaagaagacttgcaataacttcaaacatcatgtaattttcataataaacctcttcaactagctttgttcttccatgtcaaaactcttaagtcaagattatcactattcactaatgtgtcagagagccatcagattcaaaatccaaaaacttgaaagagagagataaagtctttctttagccgccttgatggaattttcacaagcttcttagaaaacttatctaaaaccccacaatagttaagaacacagaagaaatacagattcaaatgtatacgcgtgagaacatttatgtacgcaaagaaaaatattgaatttttttttttttcttttccaatcaaaatctaaatctgtatacacagatacgtattcgtacttattgtgtataagaattagaagcagaagaacatagaattggaaaaaaccagctcaagattgtgtttcttttaaaagaaacagagtaaaaatagaggaagatgaagaagacgaactatacacacagatatatagatacacatatacagagagaggaagtgaaataccagtgagaaaacgcgggattgcagatagagaaagaagaagagattagagaagagaaaaaaatagtaatgaagagaggaaggtgaaaacgaatatatgtgaggttgtcatattcttcctacttcgttctctttaggctgcgtcattttgatttgtccctttctttgattttttttatatataaaattgattagtgaaataattgtttttataatgcatgttgattaatttagtaatgcttaaaatggaaatttattttttcttctttttttgtttgttcacactagttgcctttccttatgtctctatcaacataattttttttcttttacgtccatttcatgtgcttcatgtaatcattaatagggagaatgtagtaggcatgcaaatatttatatgtcgaaataatttaagacattaaatagtataccaattagttggaaaatttatagattttctatgattaattaagaacagttgctaaaaacaatgaatgatatggataagttaccacatggtggtgcatttgaacttttctatgatacaagatgggagtgggacgataagtatatactaatctctaaaggtaaggttttggcagtgagatctatacatttcttcagactttatatttttttcttaattcgatattattaaaataagatgtatatttatatttatatatatatataacatattttcatcaaagattttgtatatttgttttccttcaaattggatgtcaatcaatgaatcatcttttaatttaatagttttggttgacaaacaaacattggtattattgataaatccaacttccgataaatcaaatatgtgaacaaattaatccaactaacaagagtaagataaaaaacaaataacaaaaaataattattaaagaataaaaggagagagtacagtatatactatatagtagtggggaacaaaataaaagaataaatctgctgctaggttgtcagaaaatatatacttataaacaaataaaatagacagtagtgaccaaaacaagaaagaaaggaacctttttctaacatttggagtgtagataatgatacgttacttatttttccaactaatcatacgttactttacacttcttcgttttagcaaatgatacgagtcaaaggtttgataaaaataattaaaaactcatttgtctctgtaacgtttttttgtaaattagtcaagatctactgacgctataaaacaaaatatcctttatttttctctattttgattttacgaaattgcaaagacttgggggtagttaatacagagtcatcagatctcaattctttggtcagtaagtgaatcatgtgagggggtggtcatcggttacttaacattaattagtttggtatttattgacgtacgtaattcgtgatggtaagtaagttgcactattgagaaaaaaacatttactagtatcgaatatgaccgaccgacgtatctggtctggtggtccactttattacatcaaaatatctttcgtagtccgagcctttaattaacatttatctggaatgtttttcttttcaaatgtatcactgattattttctttgtaaattgggttttgtgaatcttataagatgttcaaaatcaaactaatcatatatacaatttgaattcaagttataaattatagaccaaaatattactatccttttttaaatccaaatatggttgtgtgtgtactgttgaaaatcaagctagcatagcactggaatcctataaaacttaagtggactaagcatccacggataagcaataactacacatagaaataaatgagatgacgacaataatatacgtcacattctttggcctgtctctcttatataatccttcttctcattttgtttttctattctcctaatgttttttcagtggaatgccaacgttattatgtagtaatatagtaggagaactgagcaagcagaaccgtaaaacgattctattgttgaccggtttctcttatcttttaattgattaaataatgaattatcttaacgtgtatgttgcttcatatatagtagcttatagtaaaggataccatatcatggtaccccaaaatcaaataaaatgttctactacatggagaattttaaatgtttgaaataataattaatctaaattatactgtagttgcttatatagaatcacaattagttttttacggactaaaattaaataaagattgatgaaaaaaactatatcacatgtgtttgagaatcaccttacaaatgggccataggcttagaactgaagctctttggcccaaactaaaactatatttacttcatagttttattttcattaccaataagttgtatgaaaatatattttccagaatttctgatatttattttgttaagagtttctgtaaactttagttagtttgaagaaaataggtacaagttcaaaattttctaacaaaaaacagagcttttcaaaaatttacaaagctttcgatatatattttttttttttaggtttcgatattttgttttgttgttgttgttgtaagttgtagataattttggataataataaacatgttatcggagacttgaatgttaattacgatagtatgagaaacactacttcttttttttttggccaaaacatgagaaacattacttaaaaaagtatttccattcaacatcttttcaaaaaaatatgagaaacattacttaaaaaagtattgggaaccaccgaaaaatttaacatttcctcgtcagaaactgtcggttgtgccaaatagctagtgaaaataagaatatacaattcgactactggacaatgaatcataaggtcgagttttacgcaggcagataagatatgcttcttggtagtaactagctaggaaatcgactatggttttctttcagcggtaataacatgaccaaactatctggtcgtatggtttataggtttatgtttggtcgacatggtgtgtgctttacgtgctaaagtgctgacatgactttgtacctatgcaacaagccaacaaatatcttagtggctcaacagtccaagtcttaaaaggagttcacgaaaatggttttctaaaatgcgattccgctggtcaaaagcttgctacggtctgatattttcagaatgctgaatatgtcaccgactcgctttattacattttcgacatgcttatcacgattgtattgggcctattggctgacgaaaaattatttgtaacagtgcaacaaaccactgttatttgatacttttttaaaaaagatacttaggtaggatctatgattctcagctacatttgtgacagattaattaattatcgtataaattactatgtatccaccaaattagtgaagatgaaagaagatatttgtaaaagacgcgtgacgaggtctcatctatatatcacgtgcatcattttgttttatgtcctttgccgacagtgtctgtgtggtccgtcttagtcgtacactcgtacagagacctgtacctttcattttttcactttgtttatttttaggaatctctaactcctactactactactcttatactattattattatccacacatatctatttcataactggtaataacataaatattttagatcttttttttcgatttcactaagaaaagagtacaaacattatgtataaataaaaattaaatatatttaaaagaaactagtaacgtatgaataaataaagtagggtccaataggaggagccattgacttggaagcatatgagacagttgagaggcccaacagcccatcgccagctggatttcccctaaaagtcacgtgacctctctccccatctttcttcactatctccttccttcccacgtgaccttcctctctctctgtccctcgtccttcttcttcttcttcttcttcttcttcttcctcctccttcctcgatagagccttctccgattatgctctgtgtcctcattgttatctccggtacaatcatttctcttccccgatccttttctattccacgaatttcacatctttcgcatttgatcgtctttatattttatcttgttgattcaatcatacggatctgccggagtaaatgccgttgctctcggtcattgaatttgatatctgtaatgtgggtttttattggttttggtgattatgaggtttcattagtgctctcttgttaaagtttgcattttggagatttgagtttggctctttgatgtgagaatgtacattgaactttttgtgttgttgaatgatgaattgtaccttttgtgcggattttttgaggttactctcttgatattaaattctgtgggccaataacgaattgatgacataaagttgtttttactacagagaacagaacagagtcttcttattttgctcattttaaccaatgtcaaacaaaaacctcgttttaatccatgttacactttcagctaacttctctgtctaacaaaggttaacatgtctttctctcatttagtgcagaaacaagagcagatgggtctaattctacaccaatcaaagctttgttctcgatttagaaagcctcttttggggtaaagagatggtgagaaaataagttatacaaattatctggaagatggaagagagacgagatgatgaatcaagccctacacaccagggatcagaacttgcggaaagggtgaagttgctttcttttgaatctcaaggtgaagctttgagtaaggactcccctagaagtgttgaacaggattgctctccaggtcaaagagcatcacagcatctttgggatactggaatactctctgaacctattcctaatggtttctactcagttgttccggtgagcttttcagattttttttatttctttgtcatttggttagtaggaagatgcagtttctgaaatttgaaatcttgctccaggataagagagtaaaggagctatataatagactacctactccgagtgagcttcatgctttgggagaggaaggtgtcagaattgaagttattcttgttgattttcaaaaagataagaagctcgcaatgcttaaacagttgatcactacacttgtcagcggcagcggcacaaatcctgctttggtgattaagaaaatagcaggaacggtaggatttctgtaatgactcttccctctttgtcacagttccgcattgcatattctcctagctcgacatttatttctttaaccgcgtccattgttatgttctattgcactctctgccagtgacttactctattacctcaatttcggttcttaaaaaaaagaaacgggagttgatgtcctcatgcaatcttttcagcactgacttgtcctatactcacaaaattcattctcctcaaacaggtctctgacttttacaaacgtccaacactagaaagcccttcaaaacttgctctagaggaaaatgcgttcttgtttgaaaaccatggtgctcagttgcttggccagattaagcgtggttgctgtcgagctcgggcaattttgttcaaagttctagctgatactgtaggacttgaaagtcggctggtggtggtaagcctcagtttctcatatttcaatttttttctttacctacatttatgatctagatgattggatcttatgctatttgtctcttacaaatcaacttggtttcccttttgattcacatgtgcagggtttgcctagtgatgggactgtgaattgcatggactctaacaaacacatgtctgttatagttgtgctgaattccgttgaactactagtcgatcttattcggtttcctggtcagttggtaccgcgatcagccaaggcaattttcatgtcacacatctcgcctgctggagagagtgattctgcagaaaacgactcttgtgactcacctttggagccaaatagtcctttatatgagagaagagatcctgagaggtcggcttccgttgtgtgatttttctttctaaagcatattacagtaagatcattctaaaacaactcttgtgataagcgtcccctagagtgatatcgtttcctctgctacagtacagaaaaagatgaaaatcttcaattttatcggaagttagaaggatatccaaatgcatctggttcatcactgcgtagtttgatgctcagaccttctacagctattgaaaggaaattgaggtaaatattacatatatatttctgacaagttgtataatggaatcagtacaatgattggtataatagaaatgtgcttttcttccttcagcaacacctcgcatagtgaaccaaatgttgctactgtattctggaggcgtagccgcagaaaagtaattgctgaacagagaacagctagctcaaggtttttccgtaccctttctggcttgtattatagttaatgaaaaagaaaataatacattggcacgacctcttgttgtctttagatacagtaatgagatggaacatataaaattatgtttctcttctttttgctgattctatatttaaatctcttgattagcgattctgttatctgaagtgtgcctttcaagagctaccctttttttctctatacctaactgatgatagttggccatttgttacatttgcagcccagaacacccatctatgcgacgtggacgatcaatgttgagcactggtaggaattcttttagggattacactggtgaagcatcatctccttcaaggtaactcatttttacattagtgcatgcgaaaattttcagtatgccgctcctatcatatacattccagtattagttaagttgcttatacaagtctgcatgtatatatttgattggctgtgcaagcaattttttaatattctctagctttcaaacagttcatccacatcagaaattcgtaaaactagacggcgaagttttaggatcacaccagaaattggcgatgacattgcaaggttggtattctcatccatgtgcattgtttctactttcatcgtttagcagtttttttctatcattttcaccttgcatttaaagagctctatattggagtttattctgtaaatctagttggtaaggtatttttaaaatctacaatcatctgagcagctgctagatcacatgaaagtatggcatgagtcatctcgaatgcaaaactgctatctccaaacttctagatgcttaggttaggtgtctgtaagatggttatatgataaacatggaactatatatttactttgatagtcatagaagctgtaagccatttgatggtactccttttaattttgtaataatgatactgagattcgtgagaactaattaagaacagtgattttgtgatttgcttgtgtattgactctgatgttacaaattattgaagcgctgtacgagaaatgtatgagaaatcaaagcaaaaccgtctcttgcagggtcgagaggatgaaaacagctcagttatcgataacaacgtaagttttggctctgttagtaagagtgattgttttgttgtgttagttcctttctcattgtataaccagtctaaaagttctgagtttcttctgaagttcactgctctattagctcttacctctaaatttcttgtgatttttgtttgtgctttctcaggtgtctggtctccatcttgatgatgagttaaattctaagaagacaatgtcattgccctcatctccccatgcttacaggtgtcaaacatttggacgaagagggccttcagaatttgccgtgaaggatacatggaataaagtggttgagtcttccacattgcagaatcagcctttattaccctatcaagaatgggacattgacttctcagagctgactgttggaactcgggtggggattggtaagctgctctaaatttactactcggtgcaaatcttcttttaatcacggacgcatgatccttctgagaccttactatagataaatgagctatgaggcttatttagtatgccatatcgaacgtcttttgcaaattcaagaacgtctctgttatgttgatattctgtttttccatgttgactaaactcaaaacttttatgtaaagatacattggcttatattttgtatctaggtttttttggtgaagtttttcgtggagtatggaatgggacagatgttgcaatcaaattgtttctggagcaagatcttactgccgaaaacatggaagatttctgcaatgagatatcaattctcaggtatcttgttaccaaattcttggtcattcttagatcatacctgtgtacctctactaatggttttgcatgtttcctcgggcatctgcggttctctcttcagccgtgttcgccacccaaatggtaattttcttttttttctctcgccttttctcttgtcatttttatcaagtaatttgcggagacatgtctgatattgttatctttatttacttttgtcagataattcgtgacttgtaatctatgtatttgcagttgtactatttttgggtgcatgcacaaaacctccacgcttatccatgatcacggagtacatggagctgggatcgttgtattatttgatccacatgagtggtcagaagaagaaacttagctggcacagaaggctcaggatgcttagagacatctgcaggtatttaagctaccctgcatagctcccttgattatatgttttaagctacatatgcttatctcatgctgttttgtatttcttatgggatgcataaggggtttgatgtgcatacaccggatgaagatagtccaccgcgacctaaagagtgccaactgtctagtggacaaacattggacagtcaagatctgtgattttgggctgtcaagaataatgactgatgaaaacatgaaggacacttcatctgctgggacaccagagtggatggctccagagctcattcgcaacaggccttttacagagaaatgtgatatctttagtcttggggtcataatgtgggaactttcaactttacgtaaaccatgggaaggagttccacctgagaaggtataatatgctgtgccatgatttctctagagatgtgatatctttagtcttgtgattacacttaatgaaatttgcttcttaggttgtctttgctgttgcacatgaagggtcacgtttggagattcctgatggtccactcagcaaactaattgcaggtttagtgttgttgaataccatgtttcttgaacttttttgtttattctcttatatttctcaactgcttcagtctgagttaaagttaaccacaatttctgtgcagattgttgggcagagcctgaagaacgcccaaattgtgaagagatacttagaggcttactcgattgtgagtacacactgtgctaacaacacttctctttcggggggatatgagccggaagatgttttagctcagaaaacatcccagcttcttttaaatctcggctcttaaattatcaacctgagtggcataattttttaagatcatgagaacttagaggctataatgagacaagttcatagttcagttttgatagctgtggaacaggcagagacaccaaatgtaggatacaaacaagcatgtctattaagctgccactggtgtgattcatgttctcacaggcaatacttcttttgttggctattgaagagcattttggtctatcttaagaaaatatataatacacactattctttgttgggagaataaatagctcttcgatttctcttgtcttcatgacttcatccattattctcttgtgtctagccactttctttcttcttttctttcgtgtcaagcattcgataatccgactttatttatagactcatatcatatcccaattaaattttatgaagaagagtttttttttttctttttctgtcatataactttataaacttataaacgtatatgtggattataaactaaaaacaaaatatttttattacaaattatctgcatcatgttaagaaatttgaatcaaaatttattttgttgttatgcattagaaaaatctgagatgatcgggtcaaactatctaagactatactataatgtaaacgagattggtcggcaatcagctctagtctgtagtagtgtcggaagacgtgaacccaagtcaaaagaatatttataactatttagaccaattaagaggaaaaattagcctttattttaaaattataattttgtgtccaatgtttttttttttaaattatatctatacgtgaaattacttatcttaaaaaggtgattacaactaatcttcaattttctagtgcaacagtatttttaaattttggaaaaatctttggcagcggagaaacagatcgtgactttttatttttaataataaaaccattttatgccttttcatattccgcttcaaaacttttcttttgttatttttttttccaggaaagatttagatttgtccatatggtttcagtcaaacgaataataaaaaatagattagaatagaggacccatttaatttgtagaatagatataaaaatgaaatcaaatcttagagggctccacgttaatttgattgatagttaaattccaatgcactcatacttaatcattagggggctaatgggggtgtaaaagcacagtttggttttatataatatactctatattatacttaaatctcttgggttagataaggacttacggtcatacatatataatttcttttacttggatgattggatccattaattccctatacttttatcaaaaaaattataccaaaccaaatttcaaatcactcaagtgaaaatgttttgtacattttaaaacgaatgtagtaatgtacaatgtgtcccacatttcccattggaaccctgaagcggtaaagcctataaatattcgtgataaaaagtaattatattctcaactaaaattactatatattgtaatattcatatgggcatttttattcgtcatgtaaatctttgtgctttgtttattcgcattttacatagttgtttctgattacatcatgataagcactttatataataaggccttacagttgttacataaatacaacgaaatgataacttttttaatattggataaatataaagtctctcataagataccgttgaccataattaaagtccttaatgatagagacaaaatttataaattcaaacttggcttctctccggtgaagtcctcctctctgtttctatccaacttcttctctctttctctataaacttcctcatccgccgcaactgtaaccgtaaccgccatcatccgccgcaatttcctacaacatttccatgtgctctttcttgttgtagaagattgttcttcacatgcatcctttctgttgtgtctccgatcactccccttccacgccgtcgttctccatgtacgccgccacacccgaaactcctttcggttccgcgagatcacaaccggttattacccgatctgtctcacaacgatataaccatccaggtcaaagtaatcaccatcatctcctccacagtctctcatttaaccaccagaacgtactagccttaccggcagcagcaagggagccgcctgtggatgtcaagattaacgatatcgctgggaattcgattgccgggatattgtacaaatgggtgaactatgggaaaggatggagaccaagatggtttgttttgcaagatggagtgctttcatattataaaatcaagggacctgataagatcgttgttatccatgagactgagaaaggatcaagagtgatcggagaggagtccacacgtatgatctctaggaataagcgtcacgccgccactaacaacaccaaccaccagctccgccgcaagccattcggcgaagttcatctcaaggtttgatcaactttctctattggttttgtcagtgaaaaaaaattatttacttttttggaacagattttgtgcttagtttcctccaaagtgccatttgttttttatgtttccgcttaccactctttcttacggttttgcactattaatattttgtaactacttatcgcgccgatattttttactggtaaaaactcttaccgcttttaagacactatatattatatgattggacattaaatttagttttgatgattgaatgatataaatagtacagtactcaatattccatttgatcatcatctactcgatcggtggtatatataataggtttcatcgattcgggagagtagatcagatgataagagattttcaatattcaccggcaccaagaggcttcacctacgtgcagagacaagagaggacagagaagcttggatagaggctttacaagctgtcaaagatatgtttccaagaatgtcaaactgcgagttgatggcaccgaccaacaacttagacatctcgatagagaagcttaggctgcgattggttgaggaaggagtgagtgagtcagccattcaagactgcgaacaaatcacgaggtctgagttctcggcaattcagagccagcttttgcttcttaaacaaaagcaatggcttctcattgatacactcagacaattagaggtacttaaaaccttccgaacatcccctatgtatgtctaaactcttctaataaattgatgtatctatgtcattgtctagacagagaaagtagatttggaaaacacggttgtagatgagactcaacgacaagctggcaacggagactcaggtaacttgatacacaagaaaccttttctgtactacaacatttttatatcttgagctgatgatttcttttatctcagaagaaacaattagtgaatctgatgatgataatgaacaatttgatgaggctgaggaggaaatggatacatgtgactctctttcttcaagttcattcaaaagtattggatccgtttttcgcacatcatcattctcttcagatgatgatggacttactaatggttttgagtcagagaatgatgatgttgatccttctatcaagactattggatttaactatccacatgtcaaaagacgaaagaagttacctgatccggttgaaaaagagaaaagtgttagcctttggtcaatgatcaaagacaacattggcaaggatctcacaaaagtttgtcttcctgtctacttcaatgagcctttatcttctctacaaaaatgctttgaagatttggagtattcatatcttcttgatcaagcttctgaatggggaaagagggtaataagaatatgcaaataaccgatattaattatttagaattattttatgataccctcttgattttgctagcaaatgaaaattttcagggcaataacctcatgaggattctgaatgtagctgcatttgccgtatctggttatgcatcaactgaaggaagaatttgcaaaccttttaatccaatgttaggtgaaacatatgaggctgactatcccgataaaggccttcgatttttctcggaaaaggtttcttatttttaatatgaacacttacaagatttactcattagttttggtgaagatatcattctcttgtaaattatattttcaggtgagtcatcatcctatgattgtggcatgtcattgtgatggcaccggatggaaattttggggagatagcaacttaaaaagcaaattttggggtcgatcaattcaacttgatcctattggtttgttgactttgcaatttgatgatggtgaaattgtgcaatggagtaaggtaatgaatcttagtataaaaaataaaaaacatttgtaaatgatatgttgcttatccttctatgctcacaaatataggtgactacatcaatatacaatctcatacttggtaaattgtattgtgatcactacgggacaatgaagattgaaggcaacggtgaatattcatgtaaacttaaattcaaggaacagtcgatgatcgatagaaatccgcatcaagttcaaggtatagtagaagacaagaatggaaaaacagtggctaggttgtttggaaaatgggatgagagtatacactatgtgatggttgatcaaggaaaggtgaatgaatcccatcttctgtggaaacgaaacaaacagcccgaaaacccgacaaagtataatctaacacggtttgggatcacattaaacgagctcacgcctggtttaaaggagaagttgccaccaacagattcaagacttagaccggaccagaggtatttagagaagggagagtatgaaatgggaaacgcagagaagttgaggttggaacaaagacaaagacaggcgagagagatgcaagagagaggttggaaaccaaagtggtttagaaaagagaaaggaagtgagacttatagatacattggaggttattgggaagctcgagattctggtagttgggatgattgtcctgacatctttggtcaagttcaccaatccatcaagtaaccaaaaataataataatcaaaaactccattcactaaatattttcatttttgtttgcttgttgttgttgttctttctcgtatgttttttttgtttatgggcttacatgccattttttcgtctgccaaagattttgtgatgaaaaaaaaaaatgaatttctcctcgtaattttattgaggtccctaaaaacgaaagaaaaatattattgttaggttgaaatatatagtctaaagaaatgaaaatgccaggagttaaaaaaaaggtgtgcttggaaaattgttcatagagtgtataattagtggccaaattatgtatgattgattcaagtgtcttggatcgcttatttttatcgaatttcattataagataatatgctatttcatgttttttctcgaacacagtcaataaaacgcaccaaaatacatgttattgataagaaatatgtactatatttatctaaaatgccaatgcatttttttttgtcaattttttctttatttacctaataaacctttcatatggttaacgagatagatatagatggaccaatgaacaatatagttaaatccaagaaaattgcttcatattgcatgactcatgagtatatacacatttatagctggaattagtattatctagttcatgagtgtatacatattttatagcttaatgttttatattatctacctaataaactttcattcatatggtaaactagatatagaactaattactaatgatggcagttaatgaaacagttaactatataagtttgtagaaaaattaaattaagttttaacgtatagatattcatgtgaacaaataatgattattaatacaaaaagttaactaccacatatttcttaatgaaacaggtaactagaccagttagtagaaaaatttaaattaaatactcatgagaacaaataaatgattagtaatacaaaaagatttaattttacattttcttttcccagtgtctaccacaaaattctaacactttttttctgattgcctaagcatatatcgactacaagtataggaaattaagccttaacgttgtagtattaactttctacgatagagaagtggaaacttgagccatgtaaaatgaagcaatttcttggattcaactttattgttcaaacaaaaccaaatcgatctggtggtccatttaaagtttttgcatgcatatatgttcgtgatttgaccattaattaacattcacatgattaatctctttataaataatccttcagccttgtactctttcttgttcctaagcaaaagcagagttataagcccaaagacaataataaaaaatggaagctagagtaatttcttgcactacttttggagacaacaaggtcgtgaagattgctgttctgaatcatcaagcaattaccaaatacaaagccggagaaaacgaaacgacggttgttgtttccgatgatacatgcccggagaaagatgtcaaagagattaagaaattctgtgagaagctcggttacgtttacgaaggcagacttagcgaagagtacactcaaaccaacactggacccggtttggtctaaaaattccaaagttacatattaactttctatgttttactctttcttcatttgctttatatgatgatcattctctacagatgatgattggattactaatggctttgagtcagatgatgacgttgatccttctatcaagactattggatttaactatcctcatgtcaatagacgaaataaattacctgatccggttgaaaaagagaaaagtgttagcctttggtcaatgatcaaagacaacattggcaaggatcttactaaagtttgtcttcctgtttacttcaatgagccactatcctctctacaaaaatgctttgaagatttggagtattcatatcttcttgatcaagcttctgaatggggaaaaagggtaataaaaatctgcaaacgactaataatatttagattcttttatgacagtcttgtaattttgcctagaaaatgatatttttcagggcaataaccttatgaggattttgaatgtagctgcatttgctgtatctggttatgcatcaactaaaggaagaatttgcaaaccctttaatccaatgttaggggaaacatacgaggctgattatcccgataaaggccttcgatttttctcggaaaaggtttctttatgtttatatgaaaaacttataagattcactaattaatgtgaagttaatatacataacattttcttgtgaactttgttgttaggtaagtcatcatcctatgattgtggcatgtcattgtgatggcaccggatggaaattttggggagatagcaatttaaaaagcaaattttggggtcgatcaattcagctcgatcctatcggtttgttgactttacaatttgatgatggtgaaattgtgcaatggagtaaggtatgaatcttagtttaaccaaaaaaaaaaccattcatggatgatatgttacttatccttctatgctcaaaaatataggtgactacatcaatatacaatctcatacttggtaaattgtattgtgatcattatgggactatgctgattgaaggtaacggtgaatactcatgtaaacttaaattcaagaaacagtcgatgatggatagaaatccgcatcaagttcaaggtatagtagaagacaagaatggaaaaacagtggctaagttgtttggaaaatgggatgagagtatgtactatgtgatggtcaatcaaggaaaggagagtgaatctcatcttttgtggaaacgaaacaaacctctcgaaaaccctacaaagtacaatcttacacggtttgggatcacattaaacgagctcacgcctgatttaaaggaaatgttgccaccaacagattccagacttagaccggaccaaaggtatttggaaaaaggagagtttgaaatgggaaacagagagaagttgaggttagaacaaaggcaaagacaggcgagagagaaacaagagagaggctggaaaccaacgtggtttagtaaagagaaaggaagtgagacttatagatacattggaggttattgggaggctcgagattctggtcgctgggatgattgtcctgacatctttggtcaagttcactgatgcagggcatctttcctttttggttttagacttttagtttacattctgatttttgagttatttaacattattgccagtatggtatttttattttatttttaggttgtgataataagtctctagctagatacgacttgatcaacaagcattttagtttccgattccttaaaggattaggtttggtatcttgttatatatagtcgatagctttgtaaaggcacggcattatttaattaaatcaaagagcatttcaactcttaaatacttgttgtggctagaacttgagagttcttaacggaataagataacatagattcttggacattcttagactaaacaaaaatatatgtgttatctacaccatctggtatcatagccataaccttgatttttaagctatacatatgtatatactaatgagaacaaataaatgattgttgatacaaaaaaattatattatattttcttctgcttgcgatctaccataaaactcttaacacttttttttttttttcttctggttgcctaaggtaaaacatatatctactacaactataggaaattgtgccttaacactatactgttgttgtggcattcactttctaagatagagaactggaaaacttgagtcatgtaaaatgaagcaatttcagggattcaactttattgttcaaataataaccaaatctggtggtccatttacagttttttacatgcatacatgtttcgtgatttgaccattaattatcattcacatgattgttctctatataaaccatccatcacccttatactctttattattcctatccaaaaagcagagtaataaacccaaagacaataataaagaaatggaagctagagtaatttcttgcactacttttggagacgacaaggtcgtcaagattgcagttctgaatcatcaagcagttgccaaatatgaaacgggagaaaacgaaacgaccgttgttgtttccgatgatacttgctcggagaaagatgtcaaagagattaagaagtgttgtgagaagctcggttatgtttacgaaggcaaactcaacgaagaatacactcaaaccaacactggacccggtttggtctaaaaatttcaaagtcattaactttctatgtttcactctttctgcatttgctttatatgttctagctatctatctcttggtgatttgctggtatgaatgagtttatgagttattagtttttattacattaacacttctgtgtttaattacatttcttacaacactgaccttgaccttattaatcactggcctgtgtgtctggagagattgattcgggtttttgagtagtaatggagatggcttcttctatagcttgaaagaacgtagcaattttgtaagtaaagaacccaaccaacattggtatcaactccaaatgcatgaatccatactcaggaacaagtattctgcaatatatgaagaagtcacaagtaaatatgattgatgtaaccaagttgattttggatgaaagatatataatgcaaaacggagagagaggtgcttacgcgttccatctattgaatatcataaccaacacaacggggactagtaaccgtggctggttagctgcacctctataaaatcaattcagtaagaccaaagaacaaaagagataagtgagtgagtgagtggtctcaacatagataactgataagaatttgaagagaaacatatagtacttggcaactcctctggctccatctgccatggcatctacagagttaccaagcatcctcatatatgcaagtgaacccaacaagccagcaccaaaactgtaacaaaatattcaacacaaattaagattgatttaaaaagtccttaacgagattttgatgttcattgcatgagaagacaaacctaagtgctatctctggggtgtatgagatataagctgagactaaaccaacaccaccaataccgagtgtgagaacctgaatcttatttttcagctgcagaaaacaatccaaaagtcaagagactaggaactgaatgcttcaaaagtaacggagttgcccatgaaggtaaagagtagtgcttatacaagctgccttttcatgagatagcaatacatgatatttgtcataccatgaaaggattagctaaccaaagaaggtaccttaaaatattgttccctgtctttagcagcttgtacttctgggtcaccacgtggccgtctcagctccctaaacatcacatcctgcagcacacattagaaatgaaggaaggaattaagaaccaagaagatccatttttgccaattctgatcaatgtttacaatgaaaatgacatttcaattggtatagaattaataaatcaaagcacaagtgatccatcaattgcaaagataaacttacactgccaccagttgcagccttcgttgctctatcccatttctcttgctcacgacgtgtaggtgccagcttccatttaggagacacaatagccttactctaatgatattgacaaaaaagagtaaacttcagagacataaagaaatagcaatgtggctttgtcaaattggcttctcaccatttgctttttagcttctgacttggaggtgtcaagacgatttttcacaacggatttagaagacgatgcaagctctttacttaaatcaacatccatactaattttccacagataacaacaacaaacaaatcaaccattaatcaaaatgcaagaaataaaaaactaatttttatcagtttaaaggagaatgaacctgtcaagactcataactctgctaaagctcagaaacccagaagacttttcctgtaagcaatcacaaaaccttaaagagatttagtgaaaccttaaagttgagctaatttggggggataaagattgaacctttgaaggagatgggtcgagagaagaatcattaggatcatcaaacaatttcttcatttgatccataaaatctctgttccagattaagtctgtggaagtaatgggatcttctttttcacctccccagtactttcggagcttggtggtagtcggaggaccaccgtactctccgggagcaactccggtggaccatttctcaggtttcttattgggtagaatgattttggttggtagacgagaattgggagattgatcttgaggaattggtggtgtggttgatgttgctgagatgtaactaagaatcgccatggatgagttttttgtggagcttatgacgcacctgatgtctgatgatgatgaatgatattgatgatgatgatgcaaaataaaataaaaatctcagcttgtggcaattttggacttcgtgatattttcattaaatattcccaccaaaaaaacaaacatttcattaaaaatttgagaaaatgttacaaaaaaggaaattcggaaaaaaaaagatgcgaaaatggaatcttaacttacaataattaaaaaataaataaataaataaaaataaattaattaattaattaaaagaagataatatcttttgtatataaatcctaatcgttgtatgtgtgttaaagaatactccttccgtcccacaaaaataaattttttaggaaaaaaatttgtcccacaaaaataattttttatatttccaatgtaatttttagaactgtttacctattttacccttattaaataattaaataaatggtaataattatttttaaatagtattaagagattaaaattgtcattatatattattttttaaagaatgtgaaatttctaaaaaatccatcttcatgggacggagggagtataaattagaccctaaatatgactctaacaattggtgaaataaacaattggtaaaaattaaatatgatatttttcttaaatttgtattaattttcgaaatagttcatttctaatattttattacatcgagaaagtttgtgtgtttttaaaatttaataagtaatataattttataaagatattaattacaaaaaaaaacttcttatgagataattttttaaaaataattacaaaattattataatctctcaataaattaatacctttaagaattaataaatttctggatatatttaacaaaaagggaaaaaatgaccttaacaattatcactaggaattatcaaaatataatatatttttgatttagaaaaacatataaaatcgtcaaattcttaaagagaaaagggttaccttaaacgagacctcgggtctatataaacaacgtagtgctctctcaacttctcaccaacacaaactcaaaactttataatatctcttacatagttgttttcttctttctttgctgcttaattctctcgtttcaaacaacaatcgatcatggctttgatcaaaagcaacgccttctttacttctttgcttattcttgtagcactttttggaatttccgttggaggaaccgttcacaaagttggtgactccgacggatggacgattatgagcgtcaactacgagacatgggcatctacaataacttttcaagttggagactctttggtcttcaaatacaacaaagacttccacgacgtcaccgaagtcactcacaatgattacgagatgtgtgaaccgtccaaaccgctagcaagatacgagaccgggtctgatatcgtcattctaaccaaaccgggactccaacacttcatatgcggatttcctggtcactgtgacatgggacaaaagcttcaaatccatgtattaccagcctcattgggacctgtcgctgctccggttcctggacccgtccgaccaccaagctctttttcgtctccttcacagtctccgttggctgagtcaccggttaatcatgctccagtacagtatcagatgggaccatcaccagctccacatagtgcagcttcaaactctaatgtttggattggactctgcttccttcctttactttctttgctcatcttagtttgatatatttacacacgttttgtcttttttcttttagtttaacttcttacgtacgtttgagactttggtttgtagttttttctagagaataatacacccattattcaacctaacaacccatcctcttctaatcaaaaacctactcctagtcctaagcctttagaggatcctcttgaggttcttccagtagatgatgcaacgattgcaacacttccttacaatgcggcctcaagtccttgtgtctggagtggcttaagcttggtctggagtgacataaccaaactggcgactactgtgcggtggatattttcatgatactcgaactgaacattagttattaactttttaaagtttctactaccatgttatttaacataaatggagacacatgcttttgatgagataaaattagaacgacgattggaacaaaaggaatcagttataaattaaaaatataacttgggtcatgtgggtcgttaaatagaccccaaggccaccaacaaaactttctttataacgatgataaatccggtggtccacaatgataatacagcatcgggatcgatctatcttcttattgttatcaatacaagaatgcatcttcttgcgtataagttacgaatctagtatataatctgaatgtttctcgtacatattcaataattttctttttctaggattgtgacaagaactaaaccagcttccataaaaattgtaccagagagtcaagtgtggaagataactttttagtctttggctcgtttgctctgggatttacgcttgttaacgtctagacatcttttcctcaaccgaatcgtctttggtgtcacctgaccacattaaaccaataacagtacaacattaaaccaagaacagtaaatgcataggaagccggaaacaaaatgttcgtcatggataatatgattagctagatttggaattggtgatgaacaatgtacctctataagctcatctgaggcaacgtatcctatagcttcctcaagtgtcatctgaatagacaagaattcaaaagttaaaccacaaagggcaagaaaattttctgatcaagaaaacagttttcttatgtcatgttaaaagaggaaagggtacatacaagacgaggtggagatagcttcacattttcgtctttcccagcagagcgaatgtttgtaagttctttggccttaactgggttaagctgcagtgcaagggcaagtgagctcatggcatttcgacaatttagtatgaagaggagaagtcgaacaaacttacatcaagatctgtttctcgtgaatgctcaccgataatcataccatcatatgactgttaaagacagacaaacaaaagaaagtgcagcattagcatggatcaaacgcagaaagaccacatcacctgttccaatcaagaacagctaaaccgagaaagatatttctatgtcatatttagatggttctcacatccagccccggagacacaaagagaattccacgagcttccaaactcatcagagaatgagctgtgatagtaccacgtgccatggaaacctgtttcatcaagataaataaataaaaataaaaatttgagactacatacaaatttttatgaaggaaaaaagtcaagggaaagcaatctcttattgaaataagagtaacaagccatagacataccaatactcctttcctaacatttccaagcggacctcggtacttttcataagctgcaagaacgcgatacacaaacagcaatcaattgaagaagaatgtaataaaacgtaaaacctaagatgcttctaactaccagacagatatgtttggatctatgatgaatcctcttgcaagaaaactaatgatatctgaagctgaatttgtgtttagcagatatatgcaagaaatattatttacatagatgattcctttagaagagaagtcaactgaattgatgcttatgaaagaagaaaacattgagaaaatagatggataaatagcggactggagttgcagtaaatgcaagtagaaaagtttcatacttaggaaagcacgatgcatgaatccagttcctcgtgtgtcgctgctaaacacacatctgtacccaaccagacctctgcagaacacaagtatacgtaggttatatttcttcatggggaatgattcaatgagcagcaagcaagattttctaaaagtaattaaaaatagtaagctaaccttgaaggacaagttagtgacagtctcgtcctaccctcatttccagggacagggcccatgtcaataacttccgcccgcctgtgggagagagcttccatcactaatcctacgtgttcatcattaatctcaatagtcacctcttcaattggttcaagcttttgtcccttttcagttttatacctgaacataaaggacaaacgctcagaagtcagacgaagaagtacaacaaagtttgtagaaataaagacactataaaggagtttttctaggctaaaaagtaatccatagtcgaacaaacaataaccaagtaatgtttagtgtaatagtaacagcatagaaatcaggtaacttggtaaaaaataaaagaattc

SEQ ID NO: 313 - DNA, 82594 bp, Arabidopsis thaliana
aagcttgtgaaatacaaacacaccatattaaacatttagactacatatcaaaaccagtcgtccaaaaaaaaaaaaaaaaaaaaaagactacatatcaaaaccaacttatccaataaagttgttccaaaaagaatatgaaacatatatgatagatatatttaatagtaattaagatttgtcataaccaatcaagtaaacggatcatggcttgtataccagtggttttcaataatagcttgtataacagtggttttcaataatagatttagatatcgggtcattaacttttgaagtgggtacacaggtcgaccatatgtcgatctttcatatgaatcatgtgactcatatgcttagtgaaactagcgtccctagaacatgataattcagggcaataattgcataagtagagtgatgtttgcgttttgcttctcatcacacactcgtttccctggttgcgtgttgcatctcaaaaatattgcaaatatcccgaaatagaaagttttggaccctatctggtgatatataaagagaatccttttggcctgagtcgaactgattaaccgttaaatattttactactgaatggcacctgaattataggcaatctttacacaacaggagttacaggacatcgaggctccagtggtattcgtcgacctcatcaaaacagattaaaatacattagaaaaaagttttttttttaatgaatctaaaaaaaaagttcaaaggaaaaaggttaaaaactttggactgtgtagatcaaaattagtatgagaaaatttcaacttggagttgtcccacggttgcattgtgattatataataataatatgtgtgtatatataataacacactaaacgtcgacatcgcatacttccttcaagcatttggcttctttagctctcataaacttcatacccattcaacacttgtccttctaatcattttactcaattgaagaccattttgtttttctttttctgagtgttttttttcttgagggggcaacggaaaaaagaatgggaagagcaccatgttgtgagaaaatgggggtgaagagaggaccatggactcctgaagaagatcaaatcttgatcaattatattcatctttatggtcattctaattggcgagctctcccaaaacacgcaggtgagtttcctttttacattttactttgtatattgattatctattaatgattcttgaaaatgaagcaattttggttggtgtttttgtgcaatttgtttaggtttacttagatgtgggaaaagttgcagacttcgttggatcaattatcttagaccagacattaaacgtggcaatttcactcctcaagaagaacaaactattatcaatctgcatgaaagcttaggcaacaggtttgtcttcttttttcccctaaagagtgattgagaaatcaaacagttttagggtcgacgtttctttttttttttgtaatgtcaacttcctttttcctttttccactttgcattacactgactctctgagaagtgagtattacccagtctaagttaataaatgattatttatgtaacaatttgcaaaatattttaacaccatgggggtggtaaggagattcctgtccgtgatttcctctgtctcaaaccaaaccaaagacttcattaatttgttttcaaatatactttaaaaaaaaaacagaaacaagatcttctatattactattaaaaaaggatatgcactttgatcaatgcaaaacatatggcatgtataagcttttcttttgttgttttcttctgtttttgagcaactaaaaagcaatataaagtaagaaattgatgaaatccatacaatactattatacgtggggcgcttttttaaaaagtgttttgttttttgtttgtttcttaattaatttagatggtctgcgattgctgcaaaattgccgggacgaaccgacaatgaaataaaaaatgtttggcacactcatttgaagaaaagactcagcaaaaatctaaacaatggcggagacaccaaagacgttaacggaattaacgagaccacaaatgaagacaaaggatctgtgatagtcgacacagcctctttacaacaattttctaatagtattacaacatttgatatttcaaatgataacaaggacgatattatgtcgtacgaggatatttctgccttgatagatgatagtttttggtcggacgtcatatcggtagataattcgaataagaatgagaagaagatagaggattgggaaggattgatcgatagaaatagtaaaaaatgtagctatagtaattctaagttgtataatgatgacatggagttttggtttgatgttttcactagtaatcgtagaattgaggaattttccgacatacccgagttttaattttgattttgattttgtgttgtttttgtcgttaagactttgaaagtctttttgtaatccaaatgaataaattccttttctttttcttcctctctgtctatgtttgtagacttttgagattgcatgtaaatatgaatatcttacatgcattttgataataaacatcatttaagataacatcaagacatgtagcaatggttagtttgaacatgtaacatcactttaccatgttaccacccagattcaaacatgtatataatatgaaagaaataaaacttttaagagggccatttcggttagtttggtttctaaagaaataaatgttaactgaagtaaaaagaaattagaaatgggtcgacttgaattgtggttttcaatctaaaatgaactcctaagtgtgtaaagactaataacttcatcctggtttataatcaggacaaaaggaaccattgttaaacgttttgaacatataacaatggttccttttgtcctaattataaacccaagaacttattagagaacatactatcgccgagccaacctcactccttaactttgttttagctggttgatctacactagggttttgccctaaactttttgtgataattttttttgttctagttgatcaatgttttgcaaaacttcaacatataaggtccaaggtcctgtagtagacaactagatattatttacaaaatattaaggacttttaaactatattttgtagacctttaattaaaacctatggatggttcctacgaaaacatcaataacaccattccggtcgtacttaaaaatttaagaaaatcaaaatgacaaaaacgtgagtagattaaacgattatagttaacgattacgcatacgtaatatcacatcgaaatatggttctttaaattttaattttaattccaatatcatcatcactaaaacattcttttttccttcaatattccattagtggctaatagacaatcccatatattatttgaaaaacctagacattttaaaaaatttcgtcaacaaccaagatggtgctcctctaacaagtcttgattaaaccgaaccggaaaataaaaccggtttacacaaaccgtaattagttcagaggttttagctaatcactcgccgctttttcctatccgagatttcatcatcttcttcggaaggagcttatcgttccacaccaatggcttcttctgtccttaatctcttcaaatcatgtagacccttcactccaatacgcttctcttctcttcccaagtctcaattcagaatccaatttcccctcagacccggaaaagaaactcaactacgtcgctgtttcacgactctgtcatcattaacggacggtggagcaccaatttccggtgggaaggagctgtggctgcacaacacgatgagccggaagaaggagctgtttaagcctaaggtcgaaggtaaagttggaatgtacgtttgcggtgtcactgcttacgatctcagtcacattggacacgcacgagtctacgtcactttcgatgtactcttgaggtatcgacttggagaaataagctttaaaacttcttgggtttatggaaagttatgatttttttatgattttgttcttttgaatttgattgggaattaggcaggtaccttaagcatctaggatatgaagtgtcttacgttcgaaatttcacggatgtggatgacaaggtgagctaactctgcttcttggtggttagctcagagattcaggggtcttatacaacttaagctctgtttagaagtttagagacagcttctcgagttcgttcaggaaagttttttagtgagaacctcttaagattgagttttgtggtaccgttaggttaataggatgagtagccagtgtctgttatggcattcctggaccgcgtttaagttatttattttcttggcggctacatattgggcagtagagaagttgaagctgattgatcttatttctagtgtctccaatactgttatttcatctcatttacttgtgagaggcatgtaaaaggatggatcatagtgccatcaaagttgcaagatttgaacgtttagactgctaaagttattatattggtggttgaggctagtgaaaatgttgtactatgaaatgccaaaatggagaatagtcagtattttctctttgttagggagaagttcacttagttttatcctttatgtatgtgtctgctcttttacatctgcctacgtttgtgtcaccaactttgattaaccttaacacagactaattagctagaagaatagaactaattagtaatgtcctttactagatttcctccgtattgtgctacaagatttcacaaatgttttctttatttcagcctctctctgactatattttctaggggaactttcactttttcttattgaagttgtatatggctagattctttagctacatatgcaactgactcatgaaatttcaaattttgtagattattgccagagcgaaagaattagaggaagatccaatcagtttgagcagacgtttctgtgaggaatttaatcgagatatggaacagcttcaatgtttagatccgtctgtccaaccacgagtttcagatcatatacctcaaatcatcgacctgatcaagcaggtttgaccacatttacttcactttgctcctcatgttgctaaaaatctaagatatattctcatatgctatgttttccaattcagattcttgataatggctatgcctacaaagttgatggagacatttacttctcagtcgacaaatttccaacatatggaaaattgtctgggcgaaaattagaagataaccgtgcaggtgagagagtcgcagttgacacgaggaagaaacatcccgcagattttgctctgtggaaagtacgctttttagttacgttttagccctacattgaatacttgtttactcatttaagtcttaaaagacttctgaatttttgggcaggctgcaaaagaaggggaacccttttgggagagtccgtggggaagaggaaggcccggttggcacatagagtgcagtgcgatgagcgcggcttatctcggttatagttttgacatacatggtggcggaatggatcttgtgttccctcaccatgaaaatgaaattgctcagagttgtgctgcatgtgatagcagcaacattagctattggatccataatggttttgttactgttgactccgagaagatgtcaaaatccttggggaatttcttcactatcagacaggtaaacatttctcagttttgcaattttcttcttacatccaatatttatgcctaaatttcgtgtttacaaacatggcaggttatagacctttatcatcctcttgctctgagacttttcctaatgggaactcattatcggtctcctatcaattactccgatttcctcctcgagagtgcttcggagcgcattttttatatttatcaggtaatccctcgttatatagcttttagtcggattgaagattgcattttggagtacctcacttgtttctttagcttaagatgctttaattaggctattgaaaaaacatttaagagaacattatgttcttcttcactacaatcctttgacgatgctcatttgcttattgacagacgttacacgactgtgaaagcgctttaggcgagaaagattcgacatttgagaatggttctgttccttcagacactttgacaagcatcaacacattccgtactgaatttgtcgcctcgatgtctgatgatcttctcacacctgtaactctggctgcaatgtcagaaccactgaaaactatcaacgatctcattcacacccgaaaggtaaatataacgtctgcttttacgtttataaacctttataaccggttaatgatatagttgatcattccattttcaggggaaaaaacaagcaagaagagaagagtcacttaaggctctagagacaacaatcagagatgttcttactatcttagggcttatgcccacaagttactcagaggttctcgagcagctaaaagagaaggcactaaagcgagctggactaaaagaggaagatgtgttgcagagagtgcaagagagaacagacgcaaggaagaataaagaatacgaaagatctgatgcaattaggaaagatttggcaaaagttgggatcgctttgatggatagtcctgagggaacaacttggagaccagccattcctcttgcacttcaagaacctgtaactactacaccttgagtttttaatcctatactacaatatctattctttttcttagtggttcatagtatttttgtatcagttttgttgaattcgaccaaaagattaaagaagtaacattggattcttgtactattcgtttttgtgtaagtccagcgaacttgttatacaatgcctatgctcaataatcagaggaagtttattgtctactttatcaaaaagcttattggttttacattttgatttgtattttctagaatttgtgattataaatatttttgatatttaaaaaaaaaaggtatgagatacgtaataatttttcctaatatccaaaaaccaaaaatggttcattgatgtcgatttagttaggttatatattataactttcaaaaataaaagaaaatggagattttatatttttccgaaaaaaatatattcaaatcttgatgttgacaaaaacatataaaaataaataatcaaatcttgtatttgacttaaagaagcaagagatgttaatttttggagtaatgcatgtggtggagtctcacaagggtttcactaaatataggtttgggtgggtaatgatgaaacaagagaatcatttggaaaattcggggtccctcgtttcaatgtcgattgtctcctcaatttgtttttctttcttcttttaaatgaaatattcgtatcaatccaaaaatgtgaataattatgatggaacttatgtaaatctgaataataaatggatgttgattcttgaaaggtctttctgttgttctaaccatatatggaaaggccatgattccatatcaaaagtcgaaaggccaaaatcctaatgtccacttccaaattccaatcaacatatatattctcataattgaatattattgtttgaaggaaattctcgtaatgcttaatggttatactttgttagtgatggttatatatatacttgtcgatcacattagagccattgtggcattatggcactcaatctattattttcgagtcatgcataaaaaaaagtgcaagaacattgttttagctcaaaatagaaaccttgtatagactgtcaaaatttcgataatattgtcggtcgggtcgggtctaaaaggaagactgaccaaaacaaatatgattagctgtttattgactgttggttctaaatcttaaccaaataaatgaacagaatgtctcgaactctttttaacatgaagaaaactgaaagatgaaacttaatttggtacggtagtacttgttgactatatttcccaaaaatgtatagtgttatctgcatgattatccaagtttaaattgcataatacgttgttgacataaaaaacacacataaaatacaatgttagaattcttcacatgtttttgtctttttcaattagttttcagatgaaaattcaaaaaagtatgttcgtaaatatgaaaattcatgaactttaataatatatatttgaaaaattaaaggagtcaaatagtttttttaatataatacatatgttaggattttcacatagaaaagtacagtaaaattgaaagatataagaaaaataatgtcgtacataagagataaatactcgagtcattttcaattcatcctgaaactttaggaaaattgaaaggtagaactacagaattgttttatcctgtcaaatgaattttacaatatgtggaaggaaattcagaaatggacaagactcaataaaagttgaagggctggggtctttgagtgctctgggagtaaacaacttacagagacaagacaagtgagagacagaactctggctctacctctaacacactcatgaatgatgcaacattacacaacgtaccaagatgagtattattttaaaagagattttagtattagttatatttcatttatgtacacataatgaggatatcaagatagcaaaagtatcacatatatggtctaagtttaaggtactaaaaaaatgtgataacatatgttgtttgattatcaaatttgacaaagattgtttcatccgccggacctattgttctgacgctatctaaactattatattgattaaaacatataccaaatgagataaaaatctgtccaatcaaaactttttcaagttgtatttgtcgttttcaaatataattttatttaaatattaaataaattcattagcttatgaaaattacccccaaataaaatcagataccccattacaacaaaaaaaaaccagcaaaatatatactgaaaaatgatatgttttctctttctctttctctctatacatatagttatatacttatatatatacagtttaaactctcactttagcagccaaaactacaaaattttatgagatctataattttcacaatttgcaaatatatatcacaaaatatgatgtacgaaccttatttaattatataattgacaacacaaataaatgaaaagaatggtgcaacttgcataatggaagaagaagatcatagacattcgatttttgaaaaacatattctatgcatcttcattagaatagcataccaaaacttatttaaaaaactggttaagatatactaggtaaatttcagttttcttatttataattccgctattcgtaggattaccatttgtttttttcatttttttcgtaggattaccattactaatcaaaatgatgccgcattgctcttagaaaagttgacatcatataggcaactactagagattccatcttcatgtttcagaattgcagctagcaatcatgtggcaatctttccgtattaggcaacttaactccataaaataaattaatattttttttacatcgttgatttgataactataaacgatgagttgtagtattttttttctttgttgttaataagaatgtggtaaacaatggtatactaatgccaattttgaatactatgtatatcttgtacttgtgaaaaaatataagtaggtcatttcaccaattaattttaaaatataagatcattagacatcacataaaattagtctttcctcttgttggccttcacaagggtgttatgtcatatatgttaagttagtgaaaaccgtagttactacaaatgagttaaatatctcgtcgctataattgtatttaaatgacatacttagtgtcgctataattgtattgaaatgacatacttagtggcacacaatctatttaacatggaattaccataattaaaatacaacatcaatcatgaatcatcagatctacaaaatctagggtttatgcaaaagccgagacacgcacattgttcttcttgagtaaaaaagtaagtactaagaaacataaagtggagaatttacggaactgtttttttttccctacaattatgctgtaagagaacatatcactcacaactcacaagtaaacctatgaaacctactttaacatgaaaaagaaatgattttagagatgaaaaaacatacgacagcatatttactgaagcatgccacgtatgcatgtgaatattggtgagtgggaacgaatgcagtaaatctttggggaatttggactttggagcattgaaatttttcatgaatttaaaatagttagtgcaatcactgtcaactactataagaccactgttagttcactgtcacttttagaaaacgaccactgttttgcatcaaaagaagaaaatcaataatactattttagcttctagtatcatcatcatactccataaatcgatttaaagtaaacctaagacctctctgttttagaaaaaagaagaccaatataactatgatgatgatagtaatgatacatagatactcatatatataaatatgtacacattaatacatgtgaatttctcttttattagatataaataaaattgaaaaccctaccttcctccccccagcatacactagtaactaaaactgaaccacataacctaaaattaaaatcaacatataagaaagagaccaaatcacatttcagattacataaaatactccatttctcttaattatataattacttacttctcaaactttaattgagtagtagaactagtacccggtagcatttgaaattgctggtggctagctacggcggaggaagaagaagtcgacgacgaaggaagaggacgctttcgcttcttcttctcgtagctaacacctctagctttactctgcatatctctaacttcccttagataaagcctaacggcacgagctccaaaaggattcgtctcaggcttgcctccgttttcctcaaaggcagctcgaagacgaccgataagagcgtcaagacttccccaagcttgtcggagaggacacggacacggtgccggaggattaggatggccatagaagtgacaaatgttcgtgtggacttttgtcttaccgaactggtccaagtaacggaggaactcgagcacgtgagctccactgcatcgggaaagcgaaagcggtggccgatggttccttaagtactgtccgaacgtgttccagtctctcctcttctggttctcgtaacggcttgagttcgccgatggtgaggaggaggaagacagtggttgcgttgcttcacctccggtggctccggtgacggaggaggagttgtttgagatgatgttgaggtttgtgacacctccgtaagctgaagagccttccatcaattggggaatcatatccatttttttttaacggatcgatcgatattgattagttcttgattcttgatctttcttgatggatatggaggagctgaaattttgtttgtgcggttgggagatataataaggttactttgtgcagatatatattttgcgtattaattgatttattgagaatattattatataattagagaaaatgatataaactttgtcgtttcttttttccccttgttttgtttttatattacttgagataggtggactatagttttcatacctttactcttttgtatccattgtttgttttgtctgcatttcatataccgggtttggtgtttttaatgtaatatttcgaaattaatgtcggagggactaaatagccttttcgggataatactaaacgaaaacgttcgttacaactattaaactttttctttcgattaaacacacaactataatacctattacagtggaagtaataggtatattattaaaattacgtttaggttttaaaattttagatgttcttataaaagaatttttcttttttatgtgtagggtttactaacaatttaattgagatatttaaattagtggtttctggctctcaattcttttaaatacatagttcgtttacgtccacgactcatatttgaattttctcagtttagttgttatcctttcttccgctataaattctgaaacctttaaatatcttgtaaatagttcgattctaaatactcaagcaactagaactgaagaagcatatgggaatagtattgtcgttttagtgtgtatatttatctagcatactctcatcacttaattggtagattagagagaaaatgattgtaggttttagaaaaagtaaatgaacgtatcgtttaaaaaatatatatatatttggcttcattattgataaagacttgtaagcttggatgtcttcttactcttcatctctcgctattttttctacgataaaataattttctgtcgctagaaaaaagcagagaaggagttgggcatttaggtgtggacaaaggcacccaaaagtttgaaaaagatgggaaaatattttaattatatatttctatctatactgtagaactgattgacagttcattgatattttacaaaagtagccctcaattcttctcccttggacatatgtgaaaagggcttttcttcggaccattgtacaaaatacaaaacatcttctttatctataatatttttattttgtccgacaaaagaacaaactacgtatttagagcgtgtcatctgaaaatggtaaaaaaatattgaaccgagacgaaagatagaccataggctggtcttcactttcagtaaattcacctatttttgttttaacactgcgaagaatagagcccgattgatcaagtattacattcatctcaacccattgatcagtaacttttaaaaagaatggtatttttgcgagattgaatttttgttctcaaatccgagttatgttaaagaaaattagtttatattaatttggtagtttatacatttaagtacatagaaaatataaatgacatctctgccattaggttaacattttcgtgttgctccacaaaatttcatcacaaaaggacaaaatattctggctagatcatactaaactacaaaatcaatcctcgtttacataaacactctaaatagagttatgtacgacatcatttctaaactatgataaaacactaactttcctcaactatttatcattgaatacgacacatattgcaattagctaggtactagcagtagctcgaacttcgtaacattgcttttgtaaatatcaacgaatttttaagttaccagtgtactctcaacatttgcctaacgaagttgggagttataaaacaattattcaaataattaagtaccatcacctatgtatattctcatttctcaatacgttgagagcgtcaatgttttgcgtgcacatgcacaattttcatgtgttgagacttgagagcgttaaaaatctttagagatatctctttatgaacaggaaaatccagccattagcgacaattatgtcgttctgtccgttaacttctttcgaaaacttgatccggcgtaattttttgagtattcaaatttaccaatttgctctacaataatagttttatttgtgtttttgtataaaacctataatttatagttaagtgttctatgaatctcttaattttttttgataaaagatctgcaaatttctttcaatatgcatatgtttgatcgtatattttacatgtaatttgaggtacatgcaatttaatattttaggttatcggacgcacctcgaggtatataatgaacaaaaaatataatgaacaaaaatcgaaaaaaaaaatataatgaacaaaagtcgaaaaaaaaagtgagaataattaaacaaaaatacttctgaatgtagtgagagagtgataggctcctaattaaaaaaatagaaaagaagaaggacaaaactagagatgggacctgacatcagtcaatgtcacattactaaatgaggacagtaatttcacaacacacaaacaaatttacaccgacctcgtgtcactttaagttttgtttctagagaaacatgcactcagtttaatgccacctcaattttcaattaccatggacatatgaaaacatttacaacaagttcataataacattgtttcaaattcaagtatacaattcttgaaaagagaatgactagtttatggacgagacgagacataggttttgataaatttgcatttgtaggctttgtttgcatctcaagtttggctactcgaatttttcgttaactctaataattacacctatcgacaatctacatacttctcgcgtgatcgagttgacaaattctatagtatcagtatatcacgctcatcaaatcagaaaacaaataccattctctttgttaatcattctgcttacgcagcaaaactttaattgagtaaaactattttgttagagattgtgaaatctagaagttcactaattacttaaacagggcagacgggcagggaacaaatcgcttccacatttcttttatcttcttttctctagtcctctcctgtctttatcttaaaaaaagttaaacccttttccaatttcttttgatactttaagaaacttaaaatgaattagttcaattatgattttaaattacccgctaatcaagttgattatgcctttaataagacaaattcaatatcattaacacacaaaagaagaaagaaaaacatttcaattttgcattaaaaagcagaagagaaaactcaaatgttaaataaaaacaatgcatgaagattatgaatgaaacgagtatttggagattcattagctgtatcaaaaactcaagcaatgtttaatctgactcatgttaaaaatctgatcatcatgctttattactactacccaataaagtcactagctcaactttcttcatctttgaaattcctttgagtcctcttgattttgctatggctctaagttctaccaacttcagtgcactcaaatcttcgtctttcgcagtctcttcctcggtagtcggtattgagagactcgtcatcatctgataactcatctataacgaagttatgatcctcctcatcttcatcttcctcttggtaaaacgactctagtttcagctctgacactgattcgagaatagcaagttctggttcagattcaggttcatactcagcctcaggttcaggttcatcatactcagctgcagactcaggctcaggctcgtattcaggttcatcacgcgactctacttgatcctttttctgggtccaagtcacactgtaacttgaagcttcatcaaaaatggcctcactagaataactggcttgagatttatgtctcggtacaggagaattacgtttgaagcttgatgctggcctggtaaagggtgttgcattatgatctttgtttcgcgaatcgaaacgactggaactgtgattttgtctttctgaagcatcatcatctctttggagctgcttctcagaattgaaattgctaacttgtttcttgctttgttctcctgagtgcttcctcagtaacttaagaagggagtccactgtctcactctcttttcctccctgtcctttagaagcttcttcagtcttcttttcttctttcttagcagcagctcgagcccggagctgaacttggactttcttgaaaagctccactatctctttctcttttggtccaggtgattaagtagcctggaattttgggaaactggatagagagagtaaaggaccgtttttggaagacaacatgtcgtcttcaagaccaccatctactaaaccatccttatcttcgtttcgcctgtttctgcctcggaaaccatgcttattgtttcttgagaaatcaggattatttctcctatggcctgaagaacttgctcagcacacaaaggaagttttgttagtagcagattgtagatgtccattctcgatgcaacgtttgttaattcgacaggacgagcaaggcaatacggcgagggttctttttgacacagcagatttagagacgctcctgctatctgaagctccataaactgtatttaacaaatcaataccatacagagtaagccaaaccgctacatatataagtatataactaagaacttcagagtataatctgaaacagataccagacgacaaagagatttgaacattttgatacaaaacaagtatattgaagcttaacaaaatcataaagtataaaatcttttcactttctaatgacgcgatgcataattgaaaatctgacccttaatgctgaataatgtgatgaactaaagcacacagcagtctttacctcggatccaacttctaacatattcaaaaccttaactcacagagccaatgcctaaggaattacgcgtgaactaaagaaaattaagtaagtcctacaccgaaatagcttcgtaaacatcttcagggcacaaatgtgttcaaccaaattctcaatgtttcttagatatctgatcaaatgtcacagaaagtaatgcctaacacaccaaatttatgcaaagattaaacctttcatagtatatacctaacataatctaggtagctaaaacagtcctgatttttcgcaacataatcttactgggttctgaaaatttaacataagcaaaaatgcaaatttttgttttggattgaaatttgacaagaaatgcaacttcgttatccatagagaggcaaataacaccgtcgaaaagcaattaaaaccttcacacagtcatttcatcgaacaagtggtggacaacaataacaaaacggcaagctattccaaacagatagaaagcttatccaaattattctaacacgatgcccgaaaacagagatactaaacaattctgactatgagagagagaggaagactaagaatttatcaggaacgtagtcagaagtcagctgcaaagttcctgaaaacgccgttaacagattcagacagagcacatagagacacttcttcttcttcttgcatttgctttcccctctcctatctcaaaaactgtctcttcatatttttagagctctttgcgttaaatagggcttttcatcagtctataatgggcctgaaaggtttagcccacgtaaaagtaaattgataaatcaaaacaaatgacagttttttgtcccacatcggaaaactcagcagttttgcgtttgtttatatatcagaagaacacaacaactgtaagtcgagctaagtaacgagagcttgtgacccgagtggggacaataaggtggtggaacagtggttcaattcctcgggtcggacctgatgctgacatatatctgagctgcccagtccaagctgtgagtaatctgtgtgggtcaggcgaaggcttgactcaggcggattctaaagtcggagggtaatgcgtgaggctggtttcacagagcagcgactacttccctcttacagcagtggatggatcatagttcgaagtctctcagatccactatggcccgctggttcgatctctcctggaccaccactttttttcactttcttttgaaaaattacctaaaaattataataatttttatgctacatcaagatttggtgcaaaaatatatatttcaaggtacaaacaaaactggtttcaagattgttttggaaagtgtaatttaggattttagtttcattgttgtaatgatttattgttttctcaaatctcaatcaaagaaggcaattttagctttgacaataataaacaaacacaagaaagtgcgtctctctatgccttatggttcttagccatctcgtccacgtccaattccacggccaggattggagaatcttgtcccattgcagtttggctgaaatcgaagggaactattagagtaagcaaaaacaaaacaagattactgaaatgcaaatttaagagacaagattatgtttaacctgtttcgaacaggtccgtgatcgacggctgttctcagacagtatatagctcttccaacaatgtctgctgttgaaactggaccaaatgttctactatcatatgcttcctgttaaaaacacacatgtaaggataaagtgaacagaaagagactatagactatatagttgggtttttgcataagatcatttagttatgtatgtaccttagctttgagctcctggttttcagctgttacccaacactgattcttctcaagaacaaaaggctcctctttttcatcacccgataccatttcgaatccttctacagctgctaatcttcttaccagatacttatctgaatcgtttggatcctttaagacgacagcatctccaatgaatacaaaccttaaccatggaattcaaatggatttcataaatcatatgaaggggcacaaagatctcaggggattcaagtggttaaaagaaatgacacaaatatagtaacatttgccacagacactatagtttatttcaattaattcaatgcacaaagactatgacagtgtgtatcggctatgagatggaccacactatgtaacagaaattgatgtaacagaaacatacactggaacaccaaagattggaaattgaaaacatacctggtattagcaattggtatcttacgaataagaagtgtgttttcatttgctgtcatggttggtgacatttctggtcctttatccgagtgtaagtaggttattttcccatagaacagattcttgcagattatttgaataagttcccggtcactcagtttattactcctatgactctgtcaaaattggttaacataaaaaaaaaatcataagtttccaccactaaacaaagttgttaaaatcagctatcaacacaagagtcatcatgagacattgagcactatatgcaaaacattcaaatcttatcgaaagttataacacaacatcaacattgtcttgtgagtgaagttgttctataaaagcattcaagaatcaaaagctatcaacattaaacagcaaaatccaaatataaagtaagtctctttgtattctcaacatcaaagtttttaactttttcataaatcagatagctagtatatcttcaattatgaacagattgattcgaatgcagaatgagaacacaataaacgcagattcccctaaaccggaattctaagagcatttatcaaatagttcccgaaaaccaattcccagattgtaaagatcggagactatgaagagaaatctaaagaaagctggtgaagacaaaccaaaccttgagactgagagtgagggaatactcgagcttgtgagccatgtatcggaaccaagtcgagattgaagccatgaccaaaacccttaaaatgaatttcgcttttaaaaaataaatgctagagggtttcgaagctggcttctccgctttgtcggtcttctccgcctcgtcgccgccgtggtcgataggaacagaacagcaacaacacaaccctatgggtttggtttggtttttgataaaaatgggtttttgtttcacaaaaatcttgttgatgcgttgaaacgaaatcagaagtaaaatattaatttacataatgaaccttcatttcattatctattcatggtattcaccctgtaatttattatttcaaaaattagtccctacaagacaatttgtagtattgagacggcccattaataaaccggccccaacagtactgctgcaataaacaaaacaaagcctcgtattaaaagttcatcgaaaattaaggcggttttgatagaatgtcgagaaactgttcaattcttcaaacgcagtttgaaaagaaacaattttctcttttttcacatcagatatttaaaaaattcttttgttatccacgtttttattttttatttttttgctttaaaaaagatatatcaacaagtttttcataagtgtctccatataataaactaatacaacaaaaaaaatatttttttttgttgaaacaagatattcatattagacattgaaaaaggaagcacctaaacgaaacataaataggtctatatgtatgtcttcaaatcctaaaacttatataagataataaaacttaagaaatattattatatggaaagtattgtaggcttctagctataaaaatatacaaaagattaagacaaaaataaattttcaacaaaaaaagtgttatatagttcatttaaatttataatgactagttttgattcgaacatgtacggaactagaagtgggccatttcaatgggcccaaataaaaacacagatttttttattggatccagtttaatataagcaaactcgaaattttgtatgaaaacatataaattcgattattaaatatgaaaatatctttataaatcaaaatccagatcattctgctaatctgctcttgattaatcatcttaaatatcttatactagattttaatccgcggtatatcgcaggacgatttattttttaaaagtaatatatattaaaatttgcaaattttattttgtataaaatatttatattttacagtttataattattattaaataacgttataccacgaatccatgagacaatttttaaaaaactgaagttgtaacccctattaaaacagcatattaataatattttaaaattttataaatattgattcaaatagatccaccatataatccaattccaaaataaaacctgttctataatttctttacccgtcccgttatttttttttaaagagtaatttttaaaatttaagaattattttatatataaaagttttgcaaattgtatcattctctaatacatttatattttatagtttaattttatatactaacattatacataccacataatattttcggttttatataatcttttctaaattaggatgatttgatatgtttaatattaggggtcttaaaaaataataaattaaagatttaacccgtattgaaacggtggattaattatattttacttttttgttaatgttgattcaaaaacccgtcactccaaatatgtcttgccaaaaagccatttattttattaatattaattttattaatgatatgactctgaattataatctaaacattttagctaataaataggagtacaccatatttttttaataagggaatgtaccatatgactcaaatgcacttttacccaaatccatcaaaaaagtcttgcaaaaatactatagagataagaaacgatagtcggttttgataggtataagattagcaaatatattagttagcttaaattaattaaagaatacaaattgaaaaggtatattacactttattcgaatatagtatcaaaacttatataacacagagatttgataattttttaattgttgaatatttttttttgtgctaatttttatgtgattaagatttaattgattttgtatataaaatattaaattgttttacgaacttatttgtttataatttggtaacagatagatatttgagtatttagtatattttgcttcagtttaggaaatctttgatgacccgtctttagatccaataagccctataatctagatattaacctgcagtataccgcaggtacgcttatattttagttaaactaaaaacttttattgtaaagatgatttaaaaatatatgatattattttatttgattttaaatgtatagtaaactgtgagttgtatatgttttgttgatattatctatattgtttagtgtttaagattatacacttgtagtttgattgttaatttaagagtttcacctgtagtataccatcttgtattaatatcgatctaaacccgtcaattctaggattttccagcttgtattaaaaattgaatcacatcatacacataaaaaaatctaatatgttattaattattatagtatataagattataaattttcaatataatatgtatgaaattgaatataaatatttcaaattatgacctgttactcagtagaaagttttcttaaatctatttttcacccgttataatattttttcatgtattgaacagtttatattcgtttttaaaaattcaaattatggcatatgcaaaaaaactctaattttttttttataatgatgatattattttttcgcaaaaatagaatcatataaagatgagaagtgaattataataattaataaaaaattaatatgataatttagatatcaaatctaatttgttgattttaataagttacttttttgaaaattaataatgtatttattttttcattaaattaaattaattaaaatttagatatcaaatcttatatattgattttgattggttattatttttaaaaattaataatatatttcgttttttaattaaatttaattaattaaattaatatttgactttttaatctttaaaaagataaattaatttactttttaaaattttatttctaatgatatacctatataattacttacaaaaattaaaattatatttaaaatgtacttcccaaataatatagtagaatagttaatcctacataaaaatcataaacctggaagaaaaaaaaattggccacatagaagaaacctcacaaaacttgacatgaacgtgtttatttctataataatcatgaaccgtttgtgattgcatatgaatccaatagtggaatagagtcatcaagaatcaaatccacttgcatgacacgtgtccaaacaaaaaaagcaaatattcacactttcccaataaataaaagttggtaaaataattgtcaacgcactcctgggccctgaaccgggtgggtcaaacagacccgaacccggcggattttttcctgtaaaaacataaaaaaaatagcttctctttaaaagttatgtgttttattgtttgccattgctttgttgcttcatcgtaataacttactctctttcacgaaaactctctcaatcgagtgagaaatcagaattcgtacgttgctttgaggttaatgatccgtctctcttcttatcctaaagtttattccttcttttttttctgattgattgcaaaagaggttttccgggttttagggtttttgttttctcatcacgtttttttcgcccgagtcgtgaaatttctcttttcccacgttttgggtttcgaagttttgtaagtctgcttctatctccgtcaaaattcgttgatttttgtgataaagtttgtttttttcgcaagtttagcacaagcttaaatccttcaattttcagcttctgtttgttaaatttcaggtttttgttgtttttgagctaattgaagaccctatttgatcttaagaagcaatcagcttttagtttaagcatctagaaacttgaattttgcgaacctttttggtatttttcaaaatttagtctctctgtagaactttggttttgtgtccgatgatcgttgattggtttctcagggtttaagttggtgttgaaatatttaactttctatttatggtctctacatgttttctgtttaattctattagaaacatgtgatacagagaggtagcttatatctgcagtcaaaagatcttataaaggatatgtttatgttatatatatcttaaggaacttgtttcggttagaatttagcgtctaaaaggctcctaggatttggggaatattgattattggtggatacaactatacaaaaggcttacttagaagttgcattagccatgttttcttggataatctctttaggataacggctaagcaattgtcttttgttatgaatatagctcttctattcttttgcaatcttgtttctctaactaaagaattgatgttgtgtatgcgcatatgcttcttctctctctgagttttctttttgttggcattgacaggacgcacacaagaacttaattcgattcagagagataatggattttaaaggtataaaatgggttgggaatgtttatcagaagtttgaagcaatgtgcttagaggttgaagaaattatcgtgcaggtaaatgcttgtttgtgtaagaacctgtaattgcttacctcgttgattgtatcctttatttaaactcttgctttgcttttttgtgtttttaggacacagcaaaatatgttgagaatcaagttcagacggttggtaacagtgtcaagaaattctgttcagatgtggttcacgacttgctgcctgatgaatctgtagattcgggaaaacctttgcccgtttctatgttacatgaatacgcccctgtttattctttcaaaaaaaaaaaagatagtatgaaccggaaaactaaagatgtgacacaagagcaagaggtaactgaggggaagaaggatggatttgcaaagaaattacgtggtcttgatgcagatgattatgatatctgtacttctccaaggcagtatagttatggaggtccatacagaagaacaagaatcggccgcaaacagatatttaaaaaagaggagctttcccaagtcatcaggccttatatccagaaagacttgactagtttatcaatggttcatagtgctcgtgtcaaagatgatcttggaactgtaaactctagtagtttatcaatggttcatagtgctcgtgtcaatgatgatgttggaactgtaaactcaagtagtttatcaatggttcatcatgctagtatgaaagatgatgtcggaactgtaaagtcaagtgattctcctccaggtgaagtagaaaaactcatctccaaaaagaaatgtcagaaagacgataaagccaaaaatcaacagagtctgacagtggttaattctgttaaaagtaatgattcagaggttatagtcgataatgaacacggtctttcggcagataagtctgttagaagtcaagatttggagattcaaccatctctggccactagcttacctgcagaatctgatggtaacatttctgcattctgatttttctctcttttgaaactattgattcttaaactagatcctgttacatcatatccagtaccacaacctatatgttctgtatcatttggtttagtttcatgattatgcgattgcttagcgttgtttgctacttgcattgagaatagaatgcaaaagagagaaagtagctcatgatttgaagcaaattcacttaaacttggttatggtttcttctattcagattgcagaaaggaaaccaatgtggaaacaagttcgagttctgtctcagagccgaagtcagagattctccaacatcttagtgggagatcagttgaagaaagctgtatacttgtggatagagacgaattccatagtgtgtttcctgacaagatggagaatgacaaacacaaaccttacaaggttgcttcttctgtctctctctatctgtctctgtctttgtctcttttttgtttcatgtttgcatatatcatcacgtgtaaagtaacaccgccttataataaactgattctacagaagatcagagacgctatatcttcaagaatgaagcaaaacagagaaaaagaatacaagcgacttgcccggcaatggtacgcagaagatgttgaaaatgggagagaatgtggcgataatccgaaaccgatagaggaaaaccaatcatcagaagaatctgaatgggagcttctgtaaaatgttaaatggtaaacagagaatatagctctcctctctctctttgtacataaagaatgtattaagcaaaacataagataagaagcagctaagaagtcaaaaggcttcttcctctggttacataataaataaggcccttatctttatcaaattttcgtttaacttatttttataatttcaagtgaagatgttttataaattgtttgcatttgtgaatatttttgtgggagaagaaaaaagtctttcacttggtggttgtgtaataattgctttcttgtttcgtctattttacatttccaaattgttccaaagataggaccactccacatcatttctattttctttcattttgattttgattttatttattttcaatccataatgtttgggacaatttgaaccatacatcttttcaaatagaaaactatagtcattttcgcaaataattttctaggagttcagaatccgataagcccctataaagtatcttcagcttcgacctattgtgctattttgcgtgttttatattcattttctcgtttatttattatgagttggaaaggatataataaactttatgtcatataatcaataactcaaccgttgaagtaattattgaattatttgatgaatgaactaatggaaatttctagttttagtcacaacttgctaatgaaggtataatcattaacaattttgaataagaagatgagccaaatgagtattaagttagtacttgcataaatagttatatttgttcctttatttatacattgatactttgtaaaaagtagtcaaaattgaaatggttcgattcattgcattacctaaataagagtcaacagagtaataaaagcattcgttaggtgtagattagaaaaaagcttacttataaagaaataaaaatgaagaaaattaaaagagaagtaagtttttgggagtgagtggtggtctagttggaaaaagcaagccaccctaaaactcatcataacatgtgccaattgctactacatatatacatcatccttgtcttttcattctctattacaacatgcattttaagccaatagctacgcagataaaatataaaccgttaaaaaagattcatgaaaattgataacacaacatgattgaggttgaactaaatggatctcttgatttttaatagtactaatcgtgctgtcaataaccaattactgaattttgtagtgacgcactgattttctacattagctagattactctgttaggaggaatagtttttactttaatttgagtacaatttttaaatttattttttcatgaaataaattggttattataaaaatttatcctttgagaacattcaatatgttaagcaattttgcaagaaccccattttaagttaataatatatcaaaaatggttgtgcatgcagaaaatttatgaaaaaataataattcatatgcatttaaatatttagtacatagttttataaatatagttaaaaaaaagttttggctgaaccgatatttctaactaacttgcttataacaagttttattcaattagtaaatttgattccaaatcacctttatcaactcttaaagtatatattaagtttaatgattgtccacgaaataattatgtatattgtatacaaaaatatataacaagaaaggtaaacaagagaactcactgtagaaacaaagacttataaaaagcttgaggcttgaagaataagttgatcattctttcttggcgaccttaaatacaaaatgggactctgtttccaactcaacttagcctctctgtctctcatactcttctcttcattccctggacttttagcacaatctcaacaacatttcttgggacaaaacaacacaagcttgttgagtggagggagatgcaatttggctagaggcaaatgggtctatgattcttcatatcctctctatagtgcttttagttgtcccttcatcgattccgaattcaactgccagaaagcgggtcgtccggacactaactatcaacacttccgttggcagcctttctcctgtcctctccctaggtacttttgcacatgtattactattaaccactatagttttaaatagttagttagaagaaaagctaaggtttagattggcttatacactaatttttgcgtttgtgtataaaatatagatatatagtattttctgataaaatactttagcaatatgtaaacacaaacttgttggtgtttgcgttcacaattaacaaatgagttttgtttaaagatagtaaagattatgagtttatttgaaaacaaaagatagaaactatatataaacgcaaacgcgaacaaacaatccaaaatgtttttggtatcaaatgaacgagtatgaaaagtctaactagtatcttgatcatgcagaaaattggttttgaattgggtcaaaagaaacataataaagtttataagatatgtttttcgaaagaggtatattaacaattaaaaatgactatacagattcgatggggcgaattttatgaggagaatgagagggaagaagataatgatggtaggtgactcactgagtcttaacatgttcgaatcgttggcctgcttgcttcatgcttctctccctaatgctaagtactctcttcgtcgaagccaacctctcacttccctcactttccaggttttgatttttctttataatatctgattttattatctcttttgtttctattttcatatatcaataacttcacttaaaagtaagcatttcatagagctactcttgattctttgatatttttttgtttatcattctttcttgattttatataaaagatcctagctttatcaagtgaacaccgaacaccagtactagaaagtagaagcctacttaaattattaatctgtacaaaagtaatcattgacgattgtacagtactcatcgccaaatcttttgtcttactagtaactgatttatcttcaatctagttaaaaataaccgaaaatagcacattttctaagttaataaattttaaaatggcgtaacttcattaaaaattactcactaacaacccactttgtctcagtgagcgaacatctatgtaggtctgtgaaattctgaaaattttgtgaaacctaattttactttggacaaatttgacagtaagtgccattttaaacttatgaaaaaatgtgttttttttttttttttttctctggtaaaaccgtgtttatgttttttaacttttaatgcgacgagtcatcgcttctggcaattgaacccctttttttaatttttagtgttaatggtatctccccttttaatgcttttaggttctattgtttggttttgggtatttaattttacatcagaaaaaaaaaaaagaacgagtcttgctaattaagtgcctgcatgataatgatatgtcaaatgaggatcagatacgtagttatgttaattttctttaggtttggcgttttgatagatcaaacagttgtcatataataataaatgtaaaacaaaaacaaaaatgatattaatgtagatgagatcatgagaataagatatgactacgaattattccacattgatgttgaaaaaagaggttcctacaacgtcaccacctaatttatcttctgaagtatgattatctttgttttaaaaattgggctggttaagataatcctatatagtttcactaaaacttataagactttagcaacttgtaaggatattgaatttgtggccaagacaattgtaagatttatgtatacggactatttgacgtaagtcgtagttagtaattaattaagtttctaaaagagttttcaataataggaccaaacataaacgacatactagattattaagactacatgtacaatataaccacttacttaggtcaatgtcttattcttcattgtcgttttctaatcacaaagtgtattattaacaagtggacattcagaaatttaactaattatttattcaatattacttgtttttggggatcttcatatataattacatatagacagtgactaaacagtgacaagagtctgcctccattggagctgactttgattgctagttagctagcttctttgttaatggtttatgtgcttctctttcttttggtttgtaaaattaccgaaagcatgattatagaatatatgaatatactatattatatacatgtttaaaatgtaatatttaatgtattataaaaagagaagtaatatttctatttttatatatttttgacattttatttcctcaatattaatgttgaatcacgtaggaatgagatacacacaaagtcacaaatatcaacttttttttttcttttctatgaaatgcctcgttcaaatattatatgactgtaaaaccaaaagaaaaggtactaattgactgatcatgccatgttcttgttactgattttggggtttccttcgtatttgtcaaatgtcactagttaatgtaacatatctttaaacaaataaaaatgggcaggattatggagtgacgataaatttgtatagaacacagtttctagtagatgtggttcaagaaaaggcaggacgagtgcttgtgcttgactccatcaaacaagccgatgcttggcttggcatggatgttcttatcttcaactcgtggcactggtggactcacacctccggacttcagccgtacgatctctataaattaaactctctcttttgataagtttcattaattatatatgcttcttaattaaacgtttaataatggtttgtttaattaccagctgggattatatgagggaaggaaaccaattgtacaaagacatgaacaggcttgtggcttattacaaaggacttaacacatgggctcgttggattaacaataacattgtcccttcacgtactcaagtcttctttcaaggtgtttctcctgtccactatgagtaagttttcttttactctccctcttttttcccactttacctaaaataacgttttcaaaacattgattttcttgaaacagcggaagagagtggaacgaaccattgaagtcgtgcaatggtcaaactcagccgttcatgggacaaagatatccaggaggattgcccttaggttgggttgtggttaacaaagtgttgagccgaattagaaaaccggtccatcttctcgatctcactactctctcggagtatcgcaaagacgcacatccaagtctctacaatggtatctcaaaggatctagactgtagccattggtgcctccctggactccctgatacttggaacttacttctctactcatctcttacttcctagtccttgttttacatatttgtttgtttctaccattttataaatagtttgtgatgatcctgtgtgattgtgattgatatttttccttcgttaatttaatcttaaatgtaattaacattgttactagtttacttgcagcatcgatcagcttaaattctccatacatttgttattactttaatttattttccaaactattataacgtgcgtatttacactttcaaagtctttaacaagcaaaacttgtgtgaaggaccaatacttacacgcattatccaaacctttgaacactccaaacgaattttacgacggcacaaagaggaggaggattggacagaagagaagcgaaaatggtaggagacatcgccacgagatggaaagaattgagcggtagtagcaagtggaaagacctgcttgatcctcttgacttggatctacgccgttatatcctacactatggtgatatggctgaggtagggtaccttgcctttaatagtgaccgccggtctaaatatgtaggagatagctgctacaccaaagaagagctctttgctcgaaccggttacctcaaagccaaccctttcaggtaacaaacgtatccactagtatcatccatatcgtttcggttctagaaatttttgtttagttttcatgcctactcatatatgaaacgtgtgaaaaaatgttgtcatccaggtacgaggtgaccaagtacatatatggaacttcgtctataaggttaccagaatgtttcataatcaaatcattgtcaagggaagcatggaacaaagagtctaactagttgggttacattgcggtggctacagacgaaggcaagaagttgttagggaggaggggcattgttgttgcatggcgagggaccattcagctgtacgagtgggctaacgatttcgatttcccacttgaatcagctgttatggttttccctggagctaacccgaatgacgagcctcgcgtagcaaatggttggctatccctttatacatccactgatccacgatcacgttttgacaagaccagtgcacaagaacaggtctatacaaaaaaacctgttcccttacaaacttcacatctgaatcgacatccactgatccacgatcacgtttggtttgcaggttcaagaagagctcaaaaggttactagaattgtacaaaaacgaagacgttaccatcaccttaacaggccatagcttgggcgcagttatgtcgattctatccgccgcagactttctccataacgaatggcctaagatcacaccaagtctacaacacagcctatgtgtcacagtatttgctttcgggagtccccaaatcggtgaccgaagcttcaaaagactcgtagagtctctcgaacacctccacatcctaagagtaacaaacgtcccggacctcattccccgttaccccgtattcaggttcacagatataggcgaggagcttcaaatcaacacattaaaatcagagtacctaaaacgatctctaaacctgggacatttccataacctggaggcttacttacacggcgtggcagggacacaacacaaccaaggagaattcaaactagagattaaccgagatatagcactggtaaacaaaggtttagatgctcttgaagataagtacttagtaccaggacattggtgggttcttgagaacaaaggaatggttcaaagtgatgatgggacatggaaactaaatggtgacaggtcaaagaagaaacaagaagaagaagacgaaaaagaagaaaacaattgcaaattcccatgaatataatagctacactacatgttcttaaactcttttgaagcagtaaaagaagaagaattgcacacaaatcagaacataaaaagcaaatccaatacaagttatgtacatggaagaacaaatctagaagaagaaggagaagatctcaacaagggatcttggacatgaaccactccataacatgaattggggctttaatcaaaccaattgcgatctccactagtacagtcacacacaagcaacatggacatatgcatgataacaacaatctgccaaacaaaacaaatttcaaccagaagctaaattgatgattccaaattcaaaatcaaaaaaatcagagatgagataaactgacccgacgatccagataatgacaccgatgatggagagaaggagagaaaggaaggcgaaaggaagacctaagaggaaaccgagaggacggcaatctccgtcgcacatggtggctccggcggcgagtttttttcagttaggagatgtgactcggtgacttttgacttgtgagttgtcttttctgaattttcttaagtagaagagagaaagagagagacgcgttgttgttaggtgcatctgccgtatcgttttacttttttttcttttttttttggtagacaatcgctattcatatatttatttacatgcatttaagacttaagactatgaccattccagaataagtaatgtagatattgaatctaatttttctatttttatcatataaaatcagagaataatttcttcacgtaaaataaagatcgatttttatatgagttaaaaaagaaagagattcgatttatttatttagatgttatatgtttgtgtgaatatatattaaaattcttttggaatgaattataaaagtgacgattgttttgttgttgtgggatgaatgttggcgtggaagaaaagtgaacgaggcccatattatatagcccctgtcttctaatttatttcaaagggttgttaggcccattttctggatgtgacacagttaaaaaaattttcctaattctacaaataatattaaaaagttttccaattttttttctttcttttttaattctgcaaagtgaagcaaaactatatagtaaatgtttaacattaaaagctctaattaaattaatatattttggaaaaacattttttttttatcattatccgaccagataacatgtaattcatgacaactcaccgcgagattcgatattgtatgttttagcaatatatccatatcagaatagtaactaggtcccaattttatcgatccaattggttggtttgggtcaaaggtcttaaaacattgcaaacacaaaaaatagtgtttatcctgttgccatgaaaagaagagtactaagcccaaaatcaatttggtgaaacaagtcaattggcagattttttaattcatttttcaacaaaaggtttatatacttaccaatcttgtcgtcatatgtcaccaaacactaatcttttcaactggtggcagaacgttccaagaccaaaatgagaatgtcaaggctatagaatattattgcttgataataaagtgcaacattcaatgattcaaatgaagtcaagagaaactataatatcaatgaatctatatctgcgcgtgtagagaagaattgtagagaataatctttttgtggagaataatgttaatttgtcgagtttatagtttataattttaacctctcaaaatttccaacatgtagttgatgtcggcaaaactttatttttgaaagagtgcatcaaactgtttttaaaatttcatatatagtccaaccaatttatatataatatcagctgaaaagcatgcaattttttttttttaataatcgttgagtcatatatgtattttgaagtgcagatttcaatcattcttttaaaaaccctctagggtctatcttgttggtttccctacaaatgaaaaggtaaaacttaaacgataaagacaggggaaatagccaatcgctgttacaaaaaaggtaactcattggagacacaagaaaacatagagagtaaaaccttgatgtttaaagataaggaaggtacaagaataccaaaatcttgatacaacaaaagtgtagggaagatttatgaaaaagaaaagaaaagcatgtaaatgacgatatttaaattgacttgcatggatcagtcacagttatatgtgtgcttcgatcttcggtaaagtatatatatatcggtaaagatcagtcaatggtgttgtggatcaggaccccccggagaaaccctttcggaatccactaaaaaccgtctctcgtcttgacctttgaacttagagagatcaatcccgagttcacgtaggagaacctgactatccatatcgcccatggttgtggggcgatatgtacggaggattcgagcttgagaactcaagattggtgttgaatatatgattaggagtatgattagagattgcttaaggatcaaattcgccattaaaggtgattaagaagaagaaaagtgacttgtgggatcttaagagattgagagagagagagagatgaagttgagagagtatgatgacttgtatgtgttgagattttctatttatagataattaaagacacaaacataaaacgggaacaggttaaggatatagtttgggccagtggagagaacatgatgggatccacaacagaaattaatgaaagccgaatcctacgcatattttggattataaaactcatgcatgagttgaaaagagaaactcatcatatatgcatgcatacacaaagacactatttttcacgatatgggttattttaattgaccttcttatttttttggtcaaaatttagttgacccttaacgatcgaaattctcaggtggaaatctatatttcagggaccagtagtaagtaactttatatccatatttaattaagaattagtcataaggatcactaggataatattaaaattacaactaacctagattcttatgccactactactaggttatagtcttatagatatttatattctaattcattaatttgcttatgttgtttctcatggatttcttttgcggtttttacaaatgtcaaatttattattacagatactatgaatcaattgtactagctctcttttgataataatgtcttaattgtttttttgtttcataacaaatatatcaaaaagttttatcaatacctaattttaaataaaattaaagttttagttatcaatacctaattttaaatcaaattaaagttttaggacacttataaataaaataaaacatggatatatatagtttgcaaagaaaaaaggcaattttgtattatagacattattttaacagaatttatcgtaaggcatatgtatctagcaatggagtcatctttgtaggtgtgtaggttatatgcaaataagttacttctataagaaaacatattattttgaaatatgtagatagatgcatattattaccttcatatacatttgattaaaaaaaacttctgaggatagccgatcaacttaaattcacaagtgtttgttttacaactgaaccctttaaaaaaatatatatatatttgatgaacaaaatgcattttctaatgtcgaaaacaatttattactgtctcttactaatcattcattatctacgttttttggggtaaaattatctaagttgaaactgcagaattgatataattcaaaacattttaataacatctagatcaggtttatcaaatttgtgtatctttctaaatttcgaattaaccctctaaaacctcgcatagtaatatctatctaatcacaaagattatttttttgcattttgaagtgctaagacgtccaatcattatattcctctacctttcgaatgaaaaggtaaaactcaaacgattaaaaccggggaacattaattattagccaatggctgttacataaaaggaaactcattagagacacaagaaaacacacagagaaaaagcttggtgtattaaggtaatgtgtggtacaaggataccaaaaccttgatacaacaaagttgtacgtaaggttttatgaaaaacaaagagaggaaagaaaaacatagaaagagcgataatcatatgatgacttgcatagatggatgatgaatcagtcacattatttgtgcttggatcttcggtaaagtatttatttaggtatcgatcattcaatggtgttgtggatcgggacctccgggtgaaaccctgtcggaactcactaaaaatcgcctctcgttatgacctttgaacttagagagatcaaacccgagttcatgtaggagaacctgactatccatattgcccatggacacggcacgatatgaacggaggattcgagcttgagaacttaaggtttgtaatgaaaatatgattaggagtatgattagagtttgcttgaggatcaaagtcgccataatagaggaagaaattaaaggtgaatttggaggggtgggagttgagagagagatgcaaaatgagatgatattgagagagtatgatggctttgtatgcattgaggttttctatttatagaaaatgaggaacacaaacataaattgaataggttatgaatcgagaagtttgggtcatgagtggggagaacatgatgggatccacaacaaactaaaaccaaatccaattcatatttctttgattgtaaaactgatcatgcacgaacacaaaggcactagttgtgttatatgggttattcaattgatctaacgctcggaattctcatcaggtggaaatctatatttcatgaccagtaagaattgactttacatgcatagttgattaggaattaaagaagtgcttgacataaggttcactaggatactataaaaattacaactaatctagattcttatgctagactactacaagctaggttatatttcttttttttttttgtcaaaggctaggttatatttctattttagtttattactttgcttttgttatttattatggagttttcctaacggtatggtcacaactgtcgaatttatcatcgtaaggtactaggaatcaattgtatataacaaaagtaacagtatcttgtatgataaccattattttagtaccatttaaagcagtgttatacagaaaagtcatctttctatgtgtgcaagttatataagcaattacgtgattttttacaacagtaaacatatatttttggacgaaaacaattgtacctgatcgacaactagtttgatataatgtgtactgtaaacatgctaagaatttgtaaacatttgagaaaaaattattttagaaaatatattatcacaatattcattctgatgattttcaggtttgtaataggtaattttctaggtaacgctattttattttttcttcctgaataacacatccacatttttcttgaaaatatgattctagtttttgagacaagtttttgccaattcagaattataattggtaaaactgttccttagcggtaaaatgttttggtccataatgtcaatcatattttttctgttgaaactgtcagtttttttcaaaagattctcggaaattttcagtgcttttaaaaattcgcaagttttcaaacaatatttttataagaaaaacttaataaagtttttggctttggaaagctcttattatattaaaaaacttttaaataaccttttcatgcacaataatagttgtttccaataatgtaaatattttctagtattatgataaaaataaattttcaaaaatattagtaagtttttaagtcttaaaatttactcttaatttaactaagtttttagaaacttttatgtgtttctttttgtagaaacattgtttatcttctatactcttatttttaatgacaaattgtgattttttctatatcttatcttaaataataaatctaaactctcatttcaaaatcctaaactgtaactgtcgtattatgttttaggggaccgtctaacacggcaaacttaacgattaacggacactactacgaatagtcattcataaaataaataaaaataaagagcctaagttatctcaagtaaaaagataagaaaaatatagaaaaactactttaagtgtagaagtgcataaagaaggttattacatgggaaggtgttataagaaaaaaattagaaaccctgtgtgccgtagtataacatttcttagctttaatttttgggattattgttgcaaatgccactttctttaaacttttggatttgccattttttgacattcaaaatcaatacatttgtgaattgttttttataaaatacatttttaataacaaacactaaatcctaagtaaatgaaaccaaataaaccaagcatattgtgtaaattgtattttttatatctttaaaaatggcaaatctaaagaattataggtaaaatagcaaaatctataaatatcatttaaaacttatttgataattgattcttaattttatagggtatgttcctcaatttcaatttactacatactttacttttttagaaagtgaaaaaagggagacgaagaagcagttgttctgtcggaccacgttataaaggaatataagtgataaaatgaaatttagctagggtgaaaatggaatgtaacttgacaagacactgcaaaataatttgacgaaattaatgtacatgtcaaaccattcttctgcttataactaaaagtcaccgacaatttatccaaaaaccatttagtccttgtttatgtcgcaaagactagtataaggtgtctttgtggatgttacatatcaatggaatttggccaaagagatatcatgggtaagtgtatagataagttatcattgtgaccaaacagataaatagttcagcgcgtcatcaattcgttggtgtattgagaggattactaaagagagtctttgcgtcatacagcaatgaggacaaataggatataaaatacaaacataggctctcaatagtaatatgcgattcaactgcgaattaaatgtagtgcaatttaaatactataaaaatatctatatatgtatatatattttaattattaaatggatgtgattgtttaaaatttcagattaattatttatttgattagctaaatgccacaaaaaaataataagtaaatgaaaaatattacttgccctaatataatgaagtatgaaattagaataaaatattaattttacattatcaactggccactgcacctgccatttacttaaaattttcatttgttttcttaccatatgcccaatccactccagttttttctagagcttttgaaagtcacaaattcgaatctcaacggcgagaaacaaataatctagtctaactacacatgttcagatatttggtccacaaaattatatatgaaattatgagccaattgtttaaaataatggaccatgcataataataacgaaatttttgaagaaatgaaaacatgcccacattataagtttaatagttctcatgaaaattatttacgtcaacttcgcatcaaaataacgttcatcgatctacagacgaaaacttcagttgtttgtttttgaaaatatcaggaagaatttgaatcatttagtgttatcccacatttaactagtatatcctttattcatgtcttctttttttgtctaattgttatgttatatataggagaatttatcttaaaaacctattaaaatcagtttttttgttgattaaaactcttactgtagccactaaataacgaacgaatagtaaagataataaaatttgatcccaaacttagatctgtaagaatatattatatctataagaataattatatatccattcgaattttgccactcaacaaccacattctttggttagttagtttttttttttggttcgttagttataggtagtaacgttatagtatataataattggtcataagctcgacaactattagtattgcccacatgggatactatgtcggaccgacatatatgcacatgctctataggttcaacaaagtttatccattctcacttttattcggttgtatacattagataactaaaaagaaaaagtaaccaacggcgagtcggcgacaaaagtaatgtttggattattttatggttaatgtgacacaaaagtaatgttctacatgtcatacgttcaaatcttcctttcaacattatcttgtttatattttgacatcccataatcaatgttctacgccttcatttatttatcttaatattatatgttttaaaaaaagaataatccgagaaggattatgtccataatcacaacatatatagtttaagatggagaaaggccacatatatagcagcatgactagattacaagtcagtaaatttgatgctctttgattcggtttgacaattatcttaggtgccattagaggtagagaataaaagggttcttagataataatatccatcaaccaaaataataattgtatacatacgtgcagtttttctttatgtttttcctggacaattcttaaaattcagttatctacataacatggtgacagttagtcgtcgtcgggtcctccttgccacacaagagaaaatgaatttatatgtattatgaggttgtatcattgtcaaacttggacgaaatgttaagctattcaaagtgagaactaattctactcgaagaaaaattgatatttgtaggagtcaattttgagttatctttgctgatgagacaaaatgcttcattttcttgaagatgtttctttatattattttctacattaatatgtgtatagttaaatatgataagaataattttttggtgactaagaaagctaaagcatatgcatgaaagtgacaatgccccttcaaaaaccttatctatcccttcctaaacctaagaaggcgcctaaaattagtttccaatgattcaattagctatttcttttaacttaaaaagaactaatttatttgaacatatacgtatatatatatatatgtatgtatatgtacataattttgtaataaaaaaatgctgaattcatataggctctaaacaaagaggttttggtgcattaatatgctctattttgataaagatggatgtcaagcggatatcaaacattttgtagtatttgtgatccgtttctttatgtttcgatttatgattagtccggtgtttgatgtctaatatcataaaatacaataaaatgggatcatacattaattttcttaataaaattttgaacgtaatacatctagataagtatagaaaatagcaatatctaacaaataaatgcaaatgtttcataaaaaaaattcttgtttgttaataaaattttaataacaaattcttcgaatttttattttccgggtgtttggtgaagttcggatattggatactaaattaaaaagaaagaataaataccaaaataaattgagaagatacgttgtatcgtgcaatgacggcgccatatatactcacatcgctctctctctcgaactccaactaacataaatactttataatttaaagacagtttaattgatggatcaaagtggagtttgtcgttattgggttcgtccacgtaaagccatgatagtgatattcatgtgaaccaaaagacagattcagtcggcaaactctagtggccacgtgcgcatttcacgttttcttttgtcctttttaaaattttatctttaaatcttgtttttttctgcattatgggaccccaaaccggcgatgtgtctctgccggatacattgagtctagagctattcggtgatttaaagaatggttaaacatgttgatttgctacattgaattgcaattagataaggttgcacgagtgataagaccgtcgtgcatattcttaatatatttagattgagtagtgtgaattttatcggtggtgcaataatggaatcattatttgaaattgttgttatgtcttgatcatgaatctgatcattcatcgtatgcaataacattacatttttgtttgttggttagcgagtcgaggtatcccgaagctattggttaagtttatgggatgtagtttcacaaaaaaaaaaaagttttatggcatgtagtttgcagtttaagttttctatttggacttattcttgcggactaaagagttggatttaggatcacgtttttatatatatatatatatatataatcttcttttccacgttgaatactgtaacaattttcgtccattaatagagtgttttgtaccaacgctgatcagtagggaacaacgtaattgtgtattgtgttttctttcggtataacatgagttgagtagacgaatattgagtaattaatgtatgtgttacattaatctagttaatggaatttggtcttattgggttgaagaggaaccaattacgatttttaaataaataagctacaaatgtttatttgctttggtttatgtttgtggccactatttgaatgacctatccaataatacagtacaaagtgagctgatcaggaggttgggcatctatatacatacatgtacaaattataaagattttttttttgtttgacagcattataaagaatatttgaataaaagagattaaaaaatgatattacaatagatgtcaacatctaaaagtaatctttaacgtaattcacaactggataagtactctttgattaaatgtcaaaatctcaaacattctttagttttggcccctacaaactcaagtgaccagaccaacccactatgcaaacacattcttatgggagaaattattgaagctgaacagtcatggagctacttttggtctcctcttgctcattgtcacgactttgagccgacaactaaactttctgacatctatgtaacccgaagaaagtttttgatatttatgttgacaaacatcacgagtgggaacttttgataggacactgcgcaacacatattgatgcgaccagcccgttccttaatgccgcaattagttggaactagtcatttaaatgaaacgatattttcaaaatggcttaaaaaattcatttctgagtcgaaatgtctaatattgatggctttaaaaaataataatatgagaatttaacatatcttgatattttaaattttattaatgttgattcaaactcatccctccatataactctatcctacaatataatatattatgtattatttttttaatatgtccaaattttcataatattataaatttttattgattttaaatctatgaattataatatttaaaagttttaaatttactatttttgataaaaataaaacaattcaaaaaaactgaattaactcgtatacaaacttttaaatttgaatgtttgttaagttaagttttctcctcattcgaatttggtttattttaatcaatgattcaaaacaattcaaagaatattcaaacaaagatgataagaaaatcataaatttatgttttaacgaaatcttctaaatatatattttattaaatatgaaatatcagatacaatttcagatatattttggtcttatccaaatacaagatgtattttaaaaatactagtatagattaagatgtaccacatcaatatatatatttttttttaaattgagtttagaacataaatattttaaaatttatgtgcaggggcgatgttacaaaaaaaaaccatactgagtgcatgggccaagttaccattcttaaggcttatgatgggctcaaatcggaggacctccaaaatgatgcttagttcggtttcgggtattcgttttttgtccaaatatatgaggttccaacaacaaaagatggtggctggacgagatagcgcttcaaaagacaaaatctatcgagcattgtgtttgcggatgaaagagctaattaatgagagatatgatcaccgtggacgtctaaccaatttctaaagaatccatgtggtcgatgaatgtcatcactttgaccactattaccataaaccttttttatttgtacattgtatcatgcatagatgtgatacactcgaaaagaataatatgtgtaatgaaacaaaagaaaaaaggaagaagaagaagaagcaattgtaattaaatagttattgttcaattaattggcacatgcatgtatattctatgtatacctatcgacccttgagccttccatgggacaaccaatttgatatcgcattgtgtagattcacttctttatatcgttgttaatgacaagaaacgacgctcatatatataactcgatatatcatagacgcattattgaaaaatataggtaggatatatatttagttagataactatttccttatgtaaattcaaattcttcatagatatatcattagtcgacaaactctacaaaaactatttgttttggggcaaaactctacaataacttaaagctaaaacctattgaattaaaaacagaaacatagagaagaaagactatatttataaaattttcaaatatttaaggttcttattctagatctagggtgcacttttttgcagattaatagtgtaagattaatcggaagttccaaaatgttataggcaaaaccgttcgtgatggtctcgagtgtaaggataaaattggtatgtcacatgtaagaattgtcaataggagatccaagtgttgcgagaataattgcatgttgtggaattgttcatggattcgtttataccaatcgtatgtgttgcatgtagttagatctgatagactattcatcatgtatttcttcggaatactttgagaaacccctatcaaaatttctcattcgagaaactattaaaattttagtgggatttcttaacttttgaaaatatccactcatttatattttttttttgttttttttttgaaaatatccatatgaaaaactttccaatagagatgctctttatgatttctacgttacacacccattaaagatattcaccacagacggtacatgttatgccatcagtacaatgctagaaaaactcaaggtatacgagatgcaacaaacccgtcatcatttgtactgtacaagtagttatttttttagtaaacatttgtttaaataaatcaattttttatttttacttttttcttgcttcacatcactattcgtcagaagcccaaatattttatattggtgccgaagaccatctttcagaaaaatacattatggatacgacactatgactatgataaagtaatttgtgaaataaagacagcttttagaacaacatagtatatatttcatgacacgttataaagtgatggaatatagaactgaaaataaagagcatcaaagctaaccatgaaaagtggatttcttttatagtgaaaccatcacgctttagttcgaaacaattcgccacggttcatgtatttaggttttcgaaggtcaccgtcccatttatatatatgctttctgcctttctcttaggtcatttttctttttctttatcattgttattttcttcatgtgactaataaagaaacaaaaaaaaaacgattcttaaaaggtaatctaatttagagctggtattactttagaaataaaacactcgatgatgcaacctttttcttgttgtgtagtgaattggttcgatctttattttttgaaaaagttaaattcattgattaactaattagaagttgtagacaataaaaaagaattgggacttttacttgtttttatattttctcgtttgaattgttttttaaaatctcatttaaaactcttgaaacgaaccaagaattgctgaggtgatgagatgtaattatgaatgactttctgtagttcgaaaaaccatgacatgacgaggtcgtttctttccctaagctacgtttggaaagctcacgaagtgagtatgaaattagatttgttaagtgaaatgatgtgcataagattgctgattaatacgtatattagaaaatgtgttgtccagtgaatcagtgattcagggtgaagccgttagatatacttatgtgccacgagagaattgatcaattcgttgtaaacctagtgttttcactattcgttgaatttcctagtgttttcactattttgtgtgagaccaatttcataggtgatacattatgtaaaacctaaacattttcatttttaatgaatatttacattcttagcataaaagaaaactcctttttgtaggagttggtaaaatttgccaaccaattgtattgttcatcataattatacacgttctctacaagtctttccttaattgttatttcaccaagattcattttttcttcgcaagacacaccatgtaactcatttgattgttggaactatgaaaagacaaaaaaacatttatgaatgtgttactgcactgactccctctgcattcgccgaaatggtgcgatgagattgtagactcctcaaagatatttatctcgtatgttaatcaactcttagatactcagttcgtgggtaaactctttcagcaccataaaacataataactatgaagaaaacatgttgcgtgaaattataggtcaagtaaatctagtggatgatgtattttaattaggcttttattggcgttagagataccaactaaaaatatcagaagggcgagtgtggaaattaaatgtagtcaggtatgttcaaagtaggataacttgatgatgttggacgcaatgtcattgttaggctttgaggataaaaaatggtttattggtggtaattaaacactttttaaatcattgtatgatctaattttatttcatataattttgtattacttccgtgtgtaaaactattgttttagtaatatgatagctgtaagagctgagaatatatatttttttttaaccaaaatccttataaaatataatatcatgcatgcgtttatcggaggtggtcattcgcttgatgaagaaaacaaaatattggctcaagtcattgaatttaattacaagtacacttcaggagaacctcaatcttacagcttatacgatttttcaaacatcacattgacttcagaagtctacaatatttaacatgaaataataatacttggcaagggagcaacacaaactctagtcaaattctaggttttgaagacagaggataagagtgatgttgagggtcaggccctcctggagaaaacctatctacttcgttttggacggaaagctctcggccaatacgctttagttcagaaacattgtaacctaaccgtttcaaaagatcgttgctctcaccatctttagtctttgaattcacccgaagtatcctcccttccatttcaattaccaatagaaaggtgagcataacaaataacaataacgctttagaagccatattgagtgatgtggaaacaatgaaattaagaaaagattagtagttgggatggtggagtgaccaagctcgactgtggaagagatgattacagaagaagcttaagtgaatctatttatagttaaaaaaatggaaatgataatgtagatataacactatgcatagtggccactaattagttaagataccaaacgaattatatgcataagatatgtagctcagtggagttgcatacttgcatatattatgtatgatgtctatatatctatagtctaattcggacgacgtaccttaatttattagtcactctattcattatatcttatcttcttattttttctatatatagaatcacttaaatttccttttatagtcgtatcttccggtaccgagttcactcacactcttaatacttctcatctttgaattcgagaaatttattctttgtcaaacccgattaagaatgaaaaatcttaaaattaatactcgtattaaaaataaataaaaaggctagccagttaaaaaaaaaggaactggtgtttataacttatattataataacctcctcacttgttcaccacacgcccctattaactctctgtttcacatattttttaaaaaaatttagaactgattctttaactttctacctcttaaaatttagaagcattctatcgtaaaatggttttgtcttcttgaaataaagttttgtataatggtgattctagctaaccctaagaattggcaaaatgtttcaagtttttgtagtaaacattaagcttagtgcaattgtaaaatgtgtctacatacttctaaacctttagaggtattgcaaacgatgttttaagaaaagagttcaaacttttatttgctagtaaggcttgtatagttgtataaactcttttttacttttagaagtactgaaaattgcagatgatatatctatcccgtgagtaaaagtaaaggttttatccaggttagttaggccttagagattccaaagttaagattcaaggtggaagcataactttggaattaagcagggttgcaatgttatcaatatatgaaaaaaggtttttcttttttccaacctaagcataattcttcaatagttcgtaccatttactcatattatattactcttgtagaatctctgttaaagttcaaactgcagttttcttgataagaaaaaaaacgttacccgttcttttgttaagttaatttttacaataccatttacctttaactaaaaagcattactcactttatctgttaattaatcaaacacgagaatgcaaatgctattcgagttggtcggcattacaaagcagcaaaggttatgtgcttttctctaaaccaattgtgttatattgtcgattcggccaagttaaaagagatgacctaatacgaaaacaatataaaaaaacgaactaaagcaatcgatcagaaaaccaaagcatatcttaaaattgttttcaatgattcatttttcctatatcaaatatcaaaatatggttttcgaccgaaccacaaaaattcgtttaagacctaaattatatttctttgagaaattaatgatgcatatccgattaaatcctaaatccgaatgtgaagctaaaccatactatatattattcatattaaactaatttttgttttcgatactattaccgtactcatgcattaacctaaaaacataatgataataatatccaaactagaatctggattgaaccttgatccatcacatctatgtatatttagaaaccattagagataaaattttatttttgtggttctgaaatataaaaaaagccctgaactactgactaaaccgttaacactaattatgaattcgaaaccatttaacattacataattaataatttttcatcgagtatatatgcatattgcagtcctgacttgtattattgagcatatataatatccatgtttgaattcgaatggtagtatgacacttatatacgttacgtgttaattaggtttacatgtgttagtcaccctagcttgttaaatcttatccgattctatcattctaatattacatactacatatccacaaaacatacaatatatatatatatatatatatatatttggtgtatgtcttgataatatttttgaagaaaaaatatatttgactagaaaaaaaaaaaaaaaacatttcgttgtctaatgcatgcgtgcatgtgtactttagactgattacgatttttgtcgtggtatacatcatctatgcaaagattttagtgggattattcgagtaggttgatttttgtattcccttatatattctatgagtacgtacttctactattaattatttaacatcgtcttcctttagttttactttatctcgttactgatgatcaaagccttttttaatcaaaaacaaatgatcaaagtctcgcgtttaaaatatattagaaatttttcaactagaacggcagaaaatacattagaagtgtagcatttgatgaaatgtttttggaaaaattcaatttaaaagttactcacataaagctcataatttactgtcaaacaaaaaataacaccaattgaaatagtataaaatacatttagtggaaatcaatcttaatttagtgtgatgcggtacaaactcttaattaatttgatcatgatcagcttataactagtactgtaagaaaagttctatttattcctaattgttttaaatgttatttattttcttatttgaattgtggataagtttaacgaaattagtttctgaaattattgatataagttataaccctggagactggagtggacttatggtggtaatgtaaccgtacccatccggtacaattaatattaaaaaagaagataaatgacaattcctcataattttgggaagcacaaaagaaaacttaatacaaacaagcacattatctagtacgcttcaccttagatgaacatacttcaagatttaatttcacctcaatgttaacaagatggtagccttagagttacaccaataacgcttatgcaatgccctcagctgatattacaagtttgaatacctcaccaaaaggttataaaactactcatcattttagtgatgtctagggtccggcccaccagggctgagccgctttgaatcaagggtgcctagaaccgtttggccgtctttcgatcttaccttcagctcttctgatcttttgagaagttccctcataatctttcttatgttacctgaatctgaagggctctcttccgcaaccagtggtcggcattgatgcaccgagaactcgagtagaagcaatataaggcaaacccataacttgaaacttgccatattcagttaattgttattaatattgcctactaatccctcttcaagctagtctttggaggttcagaattaaatgtgatatcttacatgcttccaagtataggtttatatagttaagccaatgcttaatgaatgttgacctgtctaactaatctaaatgtgtatttttaaaaacttaagtaaactatattagcggcagtggttatcaagatttgtgatcaaattaaagtttgttttttaagtttgagttgcatactcatgtgtgcactaagttgaaatctagtcagatatctagtttggcttgtcatgtattgcctacaagtcgatccccaagatgccatttcccttttccctacgaactcttgaaaggccgttgctacgaaaggtccttttctcatttataaaagtaaaacctctctctctaattattttacttaattatctacataagagaaagatgtaataagttttcaatttaattaaagcgagaagatatgtagtttgcgacttgttaacatagtcctggccgatggttaatacagggtgtcttccaaaggtgaagaatcaaaccatctttgaagtaaaaacgatttgaagctatgcacacatatatactttatgtatcatatttcttcattccaaacaaataataattcatgaaacctcttgtgttaacacatcccaacaaaatggtcatgccaagcaaaagcattgacatattcttaacgttttttgtgtgctcatgttttaagtaaatatttgagaacggtttacgtgataaattgcacgttcacctatcattttcaagattggaactatattaggtgttagggagctgggaatgagtcgaaacgtgtttgacaaaattttggtttatgaccaaataacacctcaactaacaccagcccctgaaattttacgattttgagaacaatgtttttttatttgttaagtttttcttgtaaaatgtataaaaactcagtttaagccatggtgaatattacaatacaaaaaccttttatggattatgtagtaataaacacataaattcggttggagcggatgcgatatggtagtagttggatctagggaaacgcgtaaattcgatattcttttggttcgacttccatgcactaggtacattgtcgcctactcatctataaagtgaaggcttgaccgtctgtattgtttccggctggttgtattgcttggtctttggctctttgcaaaataaattaaaccatttgtccacccagatcgatgtcggagcatttcaaaacttgctggaccaacttttctttatcatactagcttattttcgatcagcttgaggccggatgacataaatcagttacggctggaaaagctaggttttagttcggatttctagtcagaccaaatcacccaaaggatgaactaataaccttaaacgatatacagtatgtaatgcattgaactatatctattacaaaaatctgtgtatgatgaagtggttgccgcgtccacttccatcttgaagtatgaaacaaaaagctatgaaagcaagtagagaagagggaaattaaaagaaaaagctatgttgttttattgatagagctagtgacgtttcataaaataatttacgttgatccatcacttatcatagagctagtaatataatatatgtaatgtggtttgattggtgaccaaaaataaagagtttctagcgattgtataaaaaaatgcagtaaacgtaatatgtgaattatatttgaatggtgatataaagcagtaaaaagtttttcataaaatgagaaagtgatcaactatatcaaaatacttagaagcggtaaaaacagtaaaagttaatagtaaaaacaataatgaaaatatgtttttatgattgatgataacaaaaaagtctaaaatagtaaactttgtatcatagcagtttatcatgtaccaaaacagtacatagttactaattagagctaataggaaataaagtttagagagttataaaaaacaacggtgcaaaatagtgatatagattttagtaccactatattttactagttttgttattggtaacaaaacgaacagcttatcaaagaaagaaagaaaaaaaaaatgaatagtacacttcttagtgtaacggtaagagttttaccaatcaaaactgtttttgtttttttagataaaatccaacgtagaatcacagaaaattcaagttatataatctacaaagctttttaggaacctactttagattttattctctatcatcaggagtagatgtgacaggcttcgtgggttttgggttactcattctcaaattatataattactaaaccctttttaaaaaaatgatagaattactcttgaaacttaccaacatgttcgttaagtatgtatatatcatatccgctaaatctatctaatggtattttgttgttgtttatgttaattttcttaagtaaacgttaaaggagtaaattagctagtgtgaccgcaaatattagaaagaataaacttttgatttaaaatgctgtttaaaagaaaataaaaaaggtgctttcataaaaagcaggatgaaaatactgtttagtgtcaaatgtatgtaaccgcaactattcataaatgttatgtaagctgttttagagaaccaatcatgacatctcataaatgttaagaacatttctaagaacatcatcgaatgaggtatatatgtttccgtcatctctcctaacttttatcttaatcctgatatccctcactgagtagcacaattttatcgaactaccgttctgtttcgagtggaacatactgatcgatgccagatctagattactaaattgttcgcaaatgaaaaagaaaaagaaaaaatggttgttcaaaggtaatttgtgttttagttgcacataaattataaatctattggattattataaaaatatagatgtaaatccaatggctttcatcaaacaaaaactttactatcaaggaagttttattgaaaatctgaattttatcttcggaatattgagaaaagtaaaaaactaaataatgatataaaattaaaggtcaaaatgtggcgcaatcaaataaaaaaatcttatactagtgaataaagtaaattgatgagtgtatttttttttttgtcaacatgtcataaaatatataagctttcggcatttatccaaaaatatgtaggggcctttgtctataaatggtcgatggattaccatattaaacactataataataattttttattatcattgactctactccacttcttaagggggcactttaggatttgatgtcgattggcgatttattaattataagatatgacataattaaccactatagtactacgttgtttaatgattttctaaatttttatactatttaagtttttttggattggaaagaaatgaaagtgtccgtactataaaagaaaaagtaagtcacacctccgaatataaatatggtatcatttgttttaaaaataaacatgttgatgttgcaatttactatcgaatatgaaagaaaaagaaataattctatattttacgatttaacccaacaaaaagtggaagcgacccaaagcgacacaactttgttttgtaaaatatatatacacattgtaagtcaacttttcgctcttaaatttttatgcttacgaaaaaagcttaaagattatattatattaaaagataaaaacaattgaaaacattaaaaaaactatattgtgtaaactagttgaaataggttactcacaagtcacaactctcctcttcttttctttttataagataaatagtcctagcctaaaaaaaaccctagtcctagcctcctcctaggcattcgaatactcggattgaattccaatcatattcattcgaatttcgagattttggattttgaagtttaggtttcgtttggatattttaaatgtctgatttggtttcgagtcatgttcggtcggttatggttttcatatttagaactggtgataattcaaaaatatttagatcattagatagatacggggaatccatggatacggttagtattggttacattcttccttctttaattatacataatatcttggagagatgcatatatgagatatgtttaagtttcgattaagctggtgaaaacaaaactactcgcaaaaattggtaactcgtttttatccccatattgaagatattatgtggtcctcaaaatcaggaaacctatgcccgcaaggccgcaactaccaagctcctttgtcgaaaacatgcaagagattctttcattctaagtttctaactttctaagcccgggtagtaacccaagttttatttcttccagattttgggcttttctagtggaccctctctacttagggctttctaatactttggtagcagaaaggtagttaatccagcaattagtgtgttctaggtgttttttcttttcttttcttatcatcttattagattaaaatgatgggtgaattaaggcaataaccatttatgataaaatatttaaggatatagcactataacttgcgaaattaagagaataacatatggactttgtcaatgacgattttaacctctgttgtcaaaaatttgacgacattttagtagtaatgacgtggtggttacgatggtggcagtgatgatgttgtgatggtggtggtgactttgtgatggtgatgacatggggatgatggtggtgccgtggtgtcggcgatatccatgataaagagtaacggtgtggacgtgtggtggttttaggtagtgacgacgtagtggttacgatggtggcggactggcggtgatgacgttgtggtggtgacggtgactttgtggtggtgatggtggtggtgctgacgttgtgatggtggtggtgacttagctttgtgatggtgatgacatagggatgatggtgatttcatggggatgatggtggtgccgtggtggttgcgatggtgatggtgagggactaagggcatgatgatggtggtgccgtggtgtcggtgatatccgtgataaatagtaacggtctggtggttttagtagtgacgacgtggtgattacgatggtggtgatgatgatggcggtgatggtggtagtgactttgtggtggtgacgacgttgtaatcggtaccggcgagttgattggttttatcttagggtcagttatgtctaaaatataggaaatacacacaatatcattggactatttattttggttagttacctaattataatatttttgtatgttataaatgcaaatttccataaaatgatccccttctatattagctgtgaagatatatctctttttttgtcaagttgagagctatactttatgagtttactttttttgtttatccactgaaaactgaaactgtataataaatatattgtaaaacatttactgcatattaataattatgtttttgttgatgtatctattaaacatgatgttgagttacgttcccattttgtagttggtttacctcaattgaagcatcgggttacgcagagcgcctggctgagctagagggttcaatacaaaaaaagaagtgggaaagagagttcgacgtgctttacattctacgcatggaatatttagttgtgatgtgtagcatatgatagaactagttagtttatttttttgttaaaaggctttagctagttagtttagctgaaaacaattttttacccattttatttcactaataaatgtatatgaaagggttatacatatattaatatatatatatatatatatatgtatatttttatattacatccaaatttccattagctaattaattgacacctatgagcaattacgtcattcttcattcgttgccctatgtattaaaattgcatcattcttcattggtggattagttttcacggtgctgtccagcccttagccccttactaactatgctgtagtatttgttagtaaatttgtaataatctggtgatagaatacatatttagctcgtcgatacaactatacattgaaaaaaaaaaaaaatgaaagttgttaaagaactatacatcgataaagaaaagttgttaaagaactatacatcgattttaatagatattttaaattgcaagacaaataatacgagtttctatagttttgagcttagtctgaactagtgaacttcaatctaaattttatccagatattgcaaaaactaacaaagacaaaactgtggtatccgtgaaatcgtctagatttgtagtttggtaagatcgtaagaaaaacaaaaaaaaaagctcaaggatttgaaatgttatgacaaaaaaagaagtgtgattgtagctgattgaaacgtaatatccacgcgccataaatgccttacatatttattttcagcctatctatttaactcacgatcgggacttgtcgactcaacaactcctttttaagctctcttatttttagattttttcccccttctttatatgatcattttcttttacatttattcttcttttcgatcgttgaataattcttggtgaatcaattttttttttattttttgtaaacatttatgaatattcctactaattcttttggggatgggagggtaaagaaaaaaatagcttacagcatttgataagctgtattgctcaaatttagatagaaatttttttgtcttatataatgtgaataaaacaaaaatgttaggctgttgggtacgtaatatatttaatgccaaaataaacgcaaaagcttatagagacagaaaatagcattaaaaccatcatcatcttggatcacgagatctctcattggttcctttcacttcttcctctctctatccgtatcttcttgatgccttgttgtttacttctatactttcaccaattcgactgtttattagtatttttttaaaattttcccatatattaggatttctcattcttttttgttcaaacagtgtttttcattctatttgcactattcattgacggagacagaaaaaaatcttttcggaatttagtatttagatttttaaaattatatgacaacatactatcaaaatatagtaattaattttttgcattttgtatacttgatgttcccgcatagatatgttgcaatagaccaaaatcttgttgttcccacatttcataaacttttaaaaccaaagttttgggagtcttttatatatatataaactaccaaataaattagtagaatttctgacaagaaattttgattaattaacgtcataaatctttcaaatagttttctcctatactagattttgagtgtcttacatgcatataattcaatgttataatgtgaggcacaatcaactcaagtcgtcacgacaaattttgagttctcagaacacatcagtggagaagcatatatctaccttagaagagtaaattaccggaatgagatgtcgaataatagaagggtaccggcacaagattgagaaaagttagccaatatgaaatcgtcaagagaaataggaagcactacatgcgtatatatgtacttgtggtcactactcaatcatacaatagagaaataggaagcattacatgcgtataaatgaacaaacattagtggatatattttttattaaatgaaacgtaatcatatatgaattttgattcaatccttcaatgttcttgtacgaaagctaaagcttggtatagataaaaatttgattcaatcattcaatgttcttgtacgaaagctagagcttggtatagatagtagcgttggcctgagtgttttaactttaatatttcgtcgtactaactatagactaaagtgaaaaagttgataaaagaaaccaataaaaaaaaacatggaaaaaaaagaaaagaagaagaagtaaagatggaggaggggtccatttctgccaccgtcctctcgtcttcaaggtctgcaacacagtatatgccttaaccctacacctttttttttgcatacaatttaccgtttttttttatattaatcatggaacttgcaatatcacaatgtatttcttttgtaccgtgaaccttttagcaagtaataaatcgcattgattactatctctctgtcttgatactgacagtttaactctctggctaaagaacaaatgttgtttgcagaggtatcaatttttttaaatgacagtaatttaaattcctttaaccggattttttttttctaactatgaattgattgttcaaattgtttaagtaaccaagttggttaacaattatattggtagtgtttatagtaaaaaatatcaacttgttgctagttaaaatttaaaactctatactacattctaaggagtataatattattcttattcaattgtggtggggaaaaaataagccctaaaaatttatataactaaaataaaaataaaaatatgaaatataaataatacttcagttttctgacccaaaacaaaacaaatataaaataagataagaaattaaccaaataatttttagattaataacttattattttttcctaaacataatttttcgactgttttgtttttatgtccacccctaatacttttcatttttgtgttatatacatttctatatggtaatctacactagttaatatgtttcaaatgatattttatgtttgtaatagttatatatatatatatatatatatgtgggtgtgggtgtgaaatagtttttgtttactataatataaataattttcattagtatattggtagttaaactattgaagttagttaacaattatttgggaaaatataaaaatcatttctatgatatatctatcagagaatctttggttcatatacttttgaatacacaaagttaaaaacgttatcatgtagaaaaaggttgagctagatagattttagaaatacatatagcatactgtattttctatacaacttaattactcacaaaaataattttaagaaagatgattgtgaattatcaactagtaagctaagtctacgaaaatggttgatgtgagaaatgaaaaagctaaggagcctaagtagaaattattaagttaggttccctgatgcccaacactttaattattatacatttgtattacattatgctcgacgcttcctagttcttcctatctagatacagcctactttccagttggaaaaaggactcaaattatcaattttcagttaatgccttcaataatttttttctgttttttttcttttatttagagtttgaacagatgaaaactctagataaaacagtaaacgaaaacatgtcgcaagggtctctctttaagatcaaataggtttaatttattttttgttaaatagtaatgcatgtgagaagaatacttacaaggaaggttcgagccacttaattcgccaaacttattcataggccaagatcaatagtcaactacagaagtatttttagtaagcatgaattaaaattggaaatggtttattgaaaaagtggatatgttggataagatatagaaggtgtagggtttacttaagtttcacgactttgggaagtataatgtggaatcttttgatatgaaggcagattgcatgcgcgtatgctttttctaaagacattaatctaaatatcatgcattgtttttctttaacttttgggagtattcaagttgacgacattttcacactttttctttcatttctgtttttgttctaattatatttcaattgtgatctttgataaacacaaacaaagacaaccaaatttgtatcaagccaaataattttttattgtttgcatctacacggacatatgttaaatgaataatttataggtatgattctaatttgatgaaaattttagagtaaataaactagcttcgaatatattgattgttaagtaaaaaaaagtttggatgtaatgtcgtattttgagttgtaatgttatatttaatttttatagattgtttttttgtaagccttgtaattctgtcaaacttttaaaataacaaaaatttaatcttttaccaaaaagaaaaagttcggatgtggaacaccaattggaaaaagtttcacacaaatttttatcaagattatttagttgataaaaaaaactaaattacacacatggattttaacatacaaagttggcatatacaacattaaatacaagtgacaacattaattatgcaaagggattattgttgattttgtcatttttcatagagatcttttgaaattgccatttttattaaaatcttacggatatgccattttctaagacttaaaaatgtatggatttcagattttttttggtaaaaatacatagtttacacaaaatactaaaccctaagaacaaccacaaccaactaaacccaaacataatgaataaaacgcatgttaaatcatatttccgtaacctgaaaaatggcaaaatctacaaactattcaaaaaggggcaaaatccacaaatgtcatcccaaaaaatggcattttcataattgattcttatgcaaatatgggatttatttttatttttctattaatttgggaacaaaacgattactatatacatatcttcatatatatagcttcaattttaaaaccaacgaatatgcacaaaaatatctagacattattccaaaactccaaactaatattcaaatgtataacgtatggttgtggtaagaagggaaaacagagtctgaaacgtaagtctatttcattgccctctctttttagtggaacgagaaaaagctgttgtgtatcattatcaacggcttaaatataaaaattaatcataaaatgaataaagtttttttcttcttctttataggtggtagaattgtaattaaaaggaaaggtagatttctcagacgatgaccttaatcataagttcctaacacattttgctcctcgaaatgcgaatctcattcaacattaggccttaatcatagttatccacatgaatgaaacacatacaatctcttctctctccctgtatatatagtatccataaaaataaaagtgactttaacaaaataaaacataaaataattgggactctacatcaatcatactagagttgtggttgttgtggaagtcgggtgtgggggaagtggatattgtggtggcaaccaatcagtttattcatgcgaaggtggtgagtaatggggatcatatgcatctgattgtggtgtatgcggcgccgtcagtgagtcgtagaagtggtctttggggagagttaaaagatgtcgtgaatgggttggaaggaccactacttattggaggggatttcaacaccattttgtgggtggatgagagaatgggtggaaacgggaggttgtcgccagactctttggcttttggagactggataaatgagttgtccttgattgatttagggtttaagggcaataagtttacttggcggagagggagacaagagagtactgtagtggctaaacgactggacagagtttttgtttgtgcccatgctaggttgaagtggcaggaggctgtagtgtcccatttacctttcatggcgtcagatcatgctcctttgtatgtccagctggaaccgcttcagcaggtcgatcctcgtcggcgcccattcaggtttgaggcggcatggttgaaccatgagggctttaaagagctgctgagtttgtcttggagtgtgactttgtcccacgcccgatgcgttgaaagagttgcagcggaagttgagaaaatggaatagagaagtgtttggggacattcacgtgcgcaaagaaaagttggtggcagatataaaagaggttcaggacctgttgggagtggtgttgtctgatgatttgctagctaaagaggaggtcctattgaaggaaatggatttggtgctggaacaagaggagactttgtggtttcagaagtcacgggagaaatacattgagttgggtgatcgaaatacaactttctttcacacctcaacaattatccgcagaaggaggaataggattgagtcattaaaaggagatgatgataggtgggtgacggataaggtggagctggaagctatggctttaacatattataagcggctgtactcgttggaagatgttagtgaagtccgaaatatgttgccaactggtggctttgcatccatatcagaggcggagaaggcagcgttgctccaagcttttacgaaggctgaagtggttagtgcggtgaagagtatgggacggtttaaggcaccaggacccgacggctatcaaccagtcttctaccaacagtgttgggagacagtgggaccctcagtgacgagatttgtgttggaattcttcgagacaggggttttaccagcttccacgaatgatgctctgcttgtgttaatagctaaagtggccaagccggaacgcattcagcagtttagaccggtgagcttatgtaatgttttattcaaaataattacgaaaatgatggtgacccggttgaagaatgtcatctctaagctaattgggccggcccaagcgagtttcatccctgggcgtttgagcattgataacattgtgttagtacaagaggcagtccactctatgaggaggaagaaggggcggaaaggctggatgttactcaagctggaccttgaaaaggcctatgaccgtgttagatgggattttcttcaggaaacgttagaagctgctggactgtctgagggttggacaagcagaataatggcaggagttacagacccttcaatgagtgtactgtggaatggtgagagaacagactcttttgtaccggctaggggattgagacaaggggatccgttgtcgccgtatttgtttgtactctgtttggagagactgtgtcatttgatagaggcgtcagttggaaagagagaatggaaaccgatagcagtgtcatgtggggggtcgaagttgtcacatgtctgcttcgcagatgacttgattctctttgcagaagcttcggtagcgcaaattaggatcattcgtcgggtgttggaacggttctgtgaggcctcgggacagaaagtcagcctagagaagtcgaaaatatttttttctcacaatgtgagtagagaaatggagcaattgataagtgaagagagtgggattggttgcactaaagagctggggaagtatttgggtatgccaatcttacagaaacgaatgaataaggagacgtttggagaagtgttggaaagagtttcagctcggttggcgggttggaagggccgatctttgagcttggcagggagaatcactctgacaaaagcggttctgtcttctatcccggttcatgtaatgagtgcgattcttttaccggtctctacgcttgatactttggatagatactccagaacttttctttgggggagtactatggagaagaaaaaacaacacttgctatcttggcgtaagatatgtaagccgaaagctgagggagggatcggattacggtctgctcgtgatatgaataaggccttggtagccaaggtggggtggcgtctgcttcaagataaagagagcttatgggcacgggttgttcgcaaaaagtacaaagtgggtggagtacaagatactagctggctgaaaccacaaccaagatggtcctccacgtggagaagtgtggcagtagggctccgggaagtggtggttaagggcgttggatgggtgcctggagatgggtgcacaataaggttctggttggatcgctggctgttgcaggagccgttggtggagcttgggactgatatgataccggagggggagagaataaaggtggcagccgattattggttgccgggatcaggttggaacctggaaattctgggtttgtatctgccagagacagttaagaggcggttgctctcggttgtggttcaggtttttctgggtaatggagacgagatatcatggaagggtacacaggatggggccttcacagtccgctctgcgtattccctcctacaaggtgacgttggagacaggccgaatatggggagcttctttaacagaatctggaagctgatcacgcctgagagagtacgggtgtttatttggttggtgagccagaatgtgatcatgactaatgtggagagagtccggcgccatttgagtgagaatgctatatgttcggtgtgtaatggagccgaggaaacaatactccatgtgttgcgtgactgccccgctatggaaccgatttggcgtcggttgctgccactgagacgacatcatgagttttttagccagtctttattggagtggttatttacaaatatggatccagtaaaggggatttggcctactctttttggtatgggaatttggtgggcttggaagtggaggtgttgtgatgtgtttggggaacgaaagatttgtcgggacaggctgaagttcatcaaagacatggcggaggaggtgaggagagtacatgttggtgctgttggtaaccggcctaatggtgtgcgggtggaaagaatgatcaggtggcaggttccaagcgatgggtgggtgaaaattaccacggatggagcgtcccgtgggaatcacgggctggctgcggcaggaggggccatccggaatgggcagggggagtggctaggtggttttgcactaaacattggatcttgtgcagcgccattagccgagttatggggcgcctactatgggctgctcattgcgtgggacaaggggtttcgacgagtggagttagacttggattgcaagttggtggtgggttttttaagcacaggggtaagcaacgctcatccgctgtccttcctggtacggttgtgccaaggcttctttacgagggactggttagtccgtgtgtcacacgtgtatagggaagctaaccgtctcgctgacgggttagcaaactatgcctttaccttgccgctagggcttcattgttttgatgcatgcccagagggagtccgtttacttttgctcgcagatgttaatggaacagagttccctcgagctgttttattgtaattttttgtagtttgttcttaataaattggggtaggcaattgccacccctcagcttaccaaaaaaaaaaatcatactagagtcaaattattccattgtcgactttgattagcatgtaatcctaagccgaccaatgtgtgtgtatgttgtgtgaaacatatgcttttcaagttttaattaattagtgaaggaggatttgacattaaccaaacaaaatattacaaattggtgtaactaagatatgatatatgttcatttattgatgtttttcaattttcctatattccttattatatgatatatatagttatgtatgtttcaagaattcgatatggcacgcatgattgaagaataatgattgaggaatttttctgtaacaaaaaaatttgaaataaacaaatatgtggctaagaacttaacaaggacacatgttgatatgtgaaataggaatcttataataaggaacaaaaggttgaaagcaaaagggtatttatttagtttactttcctattctgaacccttaacttctgctatcctttccaccaacaatctaatagtatactctctctcttttttttcctcttcttcttcttgtccttcgattttagaccaactaaacatatcaatatattaaagtagcatctctctctctctctctctctctctctcgctcttttatttttaatatcaattttgttgtccaaattctcatctctttgggaaaaccctagactaaagattccaatctcttttcttctaaatatttcttcattttttcccttttttgatttgggtatgttgggtcattgaatcttgtgactgccatggcagatcttttggggatctgcatagaagagttgcttcttgtagcagctttcaggtagctgtgtccagcctgcatcagatgttattaactcactacacaccaaacaccacaataacaacaaaacggcaagcattttgaagaggtaaacaaagcaagtgggcaacaaaaacggcacgcaagtttttcttccaagttaaaacaactcttggaatgtcattttgaaaggtaaaaaaataatgggacttaaaggatatagcgtcggagaaggaggaggagagatagttgaggttcaaggcggtcacataatccgagccactggacgcaaagaccgtcatagcaaagtgttcacatcaaagggtccacgtgaccggcgcgtgagactctcagctcacacggcgattcaattctacgatgtgcaagaccggttaggttatgaccggcctagcaaagccgttgattggctcatcaagaaagccaaaaccgctattgataagcttgaactcggggagactactactactactactcgtcaagaaccggtgaatactaaaccggaatctcccactttggttttccaaagagagaacaatgaccaaacgcagttcgtggcggccaatcttgatcctgaagacgcaatgaaaacgtttttcccggcgacgacaacaacaaacggtggtggtggtacaaacatcaatttccaaaactaccctcatcaggatgacaacaacatggtctcaagaacaacaacaccaccaccaaaccttagccaagatcttggtctctctcttcacccatttcaagggaacaacaacacagtcgtagttcccgagaccaacaatttcaccacgactcatttcgacacgttcgggagaatctctggatggaatcatcacgacttaactatgacgtcatcatcctcatcagaacatcaacaacaagaacaagaagaaaggagtaatggtggtttcatggtgaatcatcatcctcaccatcatcatcatcaaccgtcgatgatgacattgcttaatagtcagcaacaacaagtgtttcttggtggccaacaacaacaacaacaaaggggtacccttcagtccagtttattccctcattcgtttcgttcttgggatcatcatcaaacgacgtcggatcatcatcatcatcagaatcaagcttcttcgatgtttgcttcatcatcacagtatggttctcatgggatgatgatgatgcaaggccttagtttccccaacactacaagactactccacggagaagaagctactcaaccaaactcttcttcttctcctccaaactcacacctctaaactaaggtttgcttcttctttttaatgtatttatatattttaagtataataggttattaatcaagaaaccagacaataattaaatctttcataattaaattaccacatgtatttctttcagacaaccatggaggttcaaattcatgatgacatgcattgaacaagaaggaggaaattaatgtgatgaatggagctagagtaagcgctatattaattagtattaccatctatccatatatttatgattcaagactattattactcatttagtgtttgttattattattcaattttgcttgtttgtttcttatcatctttgcattgatcatcaagattgtgatatttgaaaagatgggttttatgtgtgttttggtttagtactggcgttaggctgggatattgtaatctcatatttttgttctacgagtgagtttgaattttctggtttttacttgcggtttctatttcttcggttaagtaaagagtaattgaagaacgttaaaagcataggtcgtattacatgagtaatgaagaaaaaggtgttcattatcatctgtgcagataccaattttcttttgtaatatagcttagcttgctaaaaagttgcgactatttaatagaaaagtcaaatttattacaaatttgggatttttatgaaaaagttgctattgagtattcaatgctttgtgacagtgataccaaaggatctcgatagtttagtctgctttacttggtctaattgggtttgacagaagatttttctataattcatcttgaaataattgttttagtcatatagataggcgggctatatagagaatgacatttatcactttttggcacttttacatatagtatatatatatgtacatatatttggtttgatgaaatacatgataatatatttaggttaaaggagtttgtactttgttgtcacatgatgatcattaatatttttcccaacgatgatcatcatttttatacaagacgttaaaagctacagaatgttcgtacttttaaaagtcatctactgcgagaatgactactttggccttttgattatggattgtgcttggattattagaagagttcaacaaaaggattacaacttccatctacagttttgttacaaaaggattgtactatatgtaagtgtaacccaacaaacctaaaccaacagacaggaatgcggtagagcaaaccggtacaatcaaaatcaaacacccttcataaaactatatcggatacgccaaacaatatgaaaatatatgtctctgtgtttagtttttttcgtgaaaataagattccgagcaatatgaagagctaaagtgttgtcactgtagagtacacagagagagcataagaagcatgctttatatatttacataatataaaaccaaaatatatatttacataatataggcaatccaaacatgttcacaaattccaagagccataactttgtatttagctttgatagacaatgaaatggatgaattttcattgaacataaaatccaagatacatagtacatacgaaattgtggataacttgcctagtcataagcagtgaaacctcaaatatataggtctagagcagcaaagtaaaaacaagctttgtccaatgcttcctttaagaaacaaacaatcttatgaactatatgtcccttggtgcatatgagaattgaccttgtttaccaccaaaagaaacattatcagacaacatctcgaagatgtaacttgcgttgacaaacataatggttttttttttatctaacaatttccaaaatagataagtaccgaagatgaccaagatccttgagttggaagtaattaaatagccgaattgtcaattacaaaaaagaaccaaaatatcatatggtatcatccacataaaccaaaataccaacaaaactttaccataatacaatatatatgatcaacattaaatattatcaaatctcaaataaaaaataataaagagttctaagaacatttgtggatagatcataaatagatttataaagtttgcaaaaatctatcatgaattctccttttcgtcctacaaatattacataacaatatgtaaaccacttcatccatataagctgagtcaaattctcagttcatcttcgctatatgtatcaacttatcggaatcacttctattattaatggaaaaaccgaatatcacataatgagaggttttaatttctacataaaactataaaagccatggttgtataatcaaataggactgtgggagtaatataagcaattgaaaagtatagggaaaatataagattctacaagtgataatgtcctattttgtaaataacgatcaaataaattccaaacagttttagaccaaaaaccctttggtcatcgtcaccagagattagatctaaaaccctatcagagaccatttcgcgtgaacaaagatggcggggcctttgcttcgatctctttggtcaaacaccactcgaagatccttctcttctcattcatcaccttccaaattcggatactcgctctcctccttacgctccttttcagcagccaccgcttccacagctgcagccggagctcctaatagctcgcttgaccctaatcgactaagaaacgtggctgtgatagctcatgtcgatcacgggaagacaacacttatggacaggcttcttcgtcagtgtggtgctgatatccctcacgagcgtgctatggattctattaatcttgagcgtgaacgagggatcactatttcttcaaaggtatcgcctttcgtatgtttggattggaattagagttaattgttacttcacaattttgaaaatggttctgtttgaaaatgattctgagactctatcaaagcatatttatgttctgttcttttttttttctcagtttgttctgttatgtctgtaacttgatgtgttcttttaccgattccctgagattttgttatttatcaccacgttacacgacatttaaagtttatgtcaaattttccgacaggtgacatcaatattttggaaggacaacgaacttaacatggtagacacacctggtcacgcagattttggtggtgaggtatgatactgatcttacttttagcgtattatttgattctcatgctcgtttttagtagaaatgcatattagtggacaaaagataaattaattagaagttctcaatacctactcatggtctgttgacattaggatactccttactgtagaacataggtgctatctttgtgactattttgtgtatttgaattataggttgaacgagtcgttggtatggttgaaggagctatattagttgttgatgctggagaaggccctcttgcacagactaagtttgttcttgccaaagccttgaagtatggactacgcccaatccttctcttaaacaaggtagatcgaccttcaggtatgcattgcattcactccctttcttagtaaaacttgttggtcttgtttaatttgtttagtttctcatccttttttttcttgcttcgtttatttacagtcacggaagagaggtgtgatgaagtggagagtttggtgtttgatctttttgcaaattgtggtgctacaggtgattaatatatcaaagtttaatatatgtattctaattaattttcaaatcattactaaatcaacatttcttctttctccattacttagaggaacaactagattttccggtgctttatgcctctgcaaaagaagggtgggcatcttctacctataccaaagaccctcctgtagatgcgaagaatatggcagatttgcttgatgccgtagtaagacatgttcagcctccaaaagcaaaccttgatgagccatttctgatgctggtaatataaaactccagcgaatgaaatttgcttggccaatttctttcacttttctgattgtccaatatcaagtagctgatctttgcattgtgctctttaactttggacgaggttaactaacacagttcccattgatttctgtttggcattccacagtagacttcagagaaaaatcggttgaacttagaatgtttgttaagtaagtagacttgttgttgtgagtttagaagcaactatatccgtcagtaaatttcaagaaagaacaagtgattttgtcaaactaatttcctcgggaaaggaagacattggttggacacttcatgagattatattcagtttatgaccttcggctttcctagtttgaacgtattcatgttatgtagtgaatgtgccaagatttgaatagattcatttatacgtaactattattttaagggtataaaatgtctgaactgctaaagccctagcaatgatatttaactatcgttctctcttctgatttccaggtttcaatgatggagaaggacttctatctcggacgaatattaactggaagagtaacttctggagttgtccgtgttggtgacagagtcaatggactacgcaaaactgattctggctctgagaaaatagaagaagcaaaggtttgtgtgcatattgctttgtacttggtcagccgtgtttacgaagtgtgatgttctcatctaagcagacataaacatctttcatataggttgtgaagctaatgaaaaagaaaggtacaaccatagtttcaattgacgctgctggggctggtgatattatctgtatggctggtttgacagctccatcaataggtcacacggtggctagtgcagaggtaatatccgaatggactacttccctgttttattcttagatatataattgaattctgcttttaacataacttcttccattgatccctatttgaatattaagacgcttgaataaatgcttcatttttattgtctttcaggtcacaactgcactccctactgttgagttagatccaccaacaatttctatgacgtttggtgtcaatgactctccgttggctggtcaggatggcacccacgtatgtttaattatagtgacaagatatagctctagtcattactctgcattaaacttttacatcctcagatttaccttcgggtcactgcatttctttttcatcttaattcacctatatgttgctggcattaaagttaatgtgtcccccttagcgatatttgaagaaatatgttgtgttaggtggtagaccactcgttctggcacatgttgataggcctttgctaatctgcatgcagttaactggaggaagaatcggggaccggttaatggcagaagctgaaacaaatcttgccataaacgttattccaggcttgtcagagtcatatgaagtccaagggagaggagaacttcaacttggtttgttcttttccagtttgtgtttagtgtttgttcacctgtaaagacggatataaagtatgacacacgccagaaaacacgtaactgtatttatttctctatgccaggtaaattaatttctgtcgtgtctaacaggtatcttgattgagaatatgaggcgggaaggttttgagctctcagtctcaccacctaaagtcatgttagtcacatctctttgtttacactacatactatattcgtcgtataatcagagttagttgttgaggttattagatgttggtagttgtagaggttcttagtgggcttttgaagaaaagggtcttaccagtttgtgtcataaagcaatagaagaattcttttattttttaccaagttacctgatttctatgctgttactattacactaaacattacttggttattgtttgttcgactatggattactttttagcctagaaaaactcctttatagtgtctttatttctacaaactttgttgtacttcttcgtctgacttctgagcgtttgtcctttatgttcaggtataaaactgaaaagggacaaaagcttgaaccaattgaagaggtgactattgagattaatgatgaacacgtaggattagtgatggaagctctctcccacaggcgggcggaagttattgacatgggccctgtccctggaaatgagggtaggacgagactgtcactaacttgtccttcaaggttagcttactatttttaattacttttagaaaatcttgcttgctgctcattgaatcattccccatgaagaaatataacctacgtatacttgtgttctgcagaggtctggttgggtacagatgtgtgtttagcagcgacacacgaggaactggattcatgcatcgtgctttcctaagtatgaaacttttctacttgcatttactgcaactccagtccgctatttatccatctattttctcaatgttttcttctttcataagcatcaattcagttgacttctcttctaaaggaatcatctatgtaaataatatttcttgcatatatctgctaaacacaaattcagcttcagatatcattagttttcttgcaagaggattcatcatagatccaaacatatctgtctggtagttagaagcatcttaggttttacgttttattacattcttcttcaattgattgctgtttgtgtatcgcgttcttgcagcttatgaaaagtaccgaggtccgcttggaaatgttaggaaaggagtattggtatgtctatggcttgttactcttatttcaataagagattgctttcccttgacttttttccttcataaaaatttgtatgtagtctcaaatttttatttttatttatttatcttgatgaaacaggtttccatggcacgtggtactatcacagctcattctctgatgagtttggaagctcgtggaattctctttgtgtctccggggctggatgtgagaaccatctaaatatgacatagaaatatctttctcggtttagctgttcttgattggaacaggtgatgtggtctttctgcgtttgatccatgctaatgctgcactttcttttgtttgtctgtctttaacagtcatatgatggtatgattatcggtgagcattcacgagaaacagatcttgatgtaagtttgttcgacttctcctcttcatactaaattgtcgaaatgccatgagctcacttgcccttgcactgcagcttaacccagttaaggccaaagaacttacaaacattcgctctgctgggaaagacgaaaatgtgaagctatctccacctcgtcttgtatgtaccctttcctcttttaacatgacataagaaaactgttttcttgatcagaaaattttcttgccctttgtggtttaacttttgaattcttgtctattcagatgacacttgaggaagctataggatacgttgcctcagatgagcttatagaggtacattgttcatcaccaattccaaatctagctaatcatattatccatgacgaacattttgtttccggcttcctatgcatttactgttcttggtttaatgttgtactgttattggtttaatgtggtcaggtgacaccaaagacgattcggttgaggaaaagatgtctagacgttaacaagcgtaaatcccagagcaaacgagccaaagactaaaaagttatcttccacacttgactctctggtacaatttttatggaagctggtttagttcttgtcacaatcctagaaaaagaaaattattgaatatgtacgagaaacattcagattatatactagattcgtaacttatacgcaagaagatgcattcttgtattgataacaataagaagatagatcgatcccgatgctgtattatcattgtggaccaccggatttatcatcgttataaagaaagttttgttggtggccttggggtctatttaacgacccacatgacccaagttatatttttaatttataactgattccttttgttccaatcgtcgttctaattttatctcatcaaaagcatgtgtctccatttatgttaaataacatggtagtagaaactttaaaaagttaataactaatgttcagttcgagtatcatgaaaatatccaccgcacagtagtcgccagtttggttatgtcactccagaccaagcttaagccactccagacacaaggacttgaggccgcattgtaaggaagtgttgcaatcgttgcatcatctactggaagaacctcaagaggatcctctaaaggcttaggactaggagtaggtttttgattagaagaggatgggttgttaggttgaataatgggtgtattattctctagaaaaaactacaaaccaaagtctcaaacgtacgtaagaagttaaactaaaagaaaaaagacaaaacgtgtgtaaatatatcaaactaagatgagcaaagaaagtaaaggaaggaagcagagtccaatccaaacattagagtttgaagctgcactatgtggagctggtgatggtcccatctgatactgtactggagcatgattaaccggtgactcagccaacggagactgtgaaggagacgaaaaagagcttggtggtcggacgggtccaggaaccggagcagcgacaggtcccaatgaggctggtaatacatggatttgaagcttttgtcccatgtcacagtgaccaggaaatccgcatatgaagtgttggagtcccggtttggttagaatgacgatatcagacccggtctcgtatcttgctagcggtttggacggttcacacatctcgtaatcattgtgagtgacttcggtgacgtcgtggaagtctttgttgtatttgaagaccaaagagtctccaacttgaaaagttattgtagatgcccatgtctcgtagttgacgctcataatcgtccatccgtcggagtcaccaactttgtgaacggttcctccaacggaaattccaaaaagtgctacaagaataagcaaagaagtaaagaaggcgttgcttttgatcaaagccatgatcgattgttgtttgaaacgagagaattaagcagcaaagaaagaagaaaacaactatgtaagagatattataaagttttgagtttgtgttggtgagaagttgagagagcactacgttgtttatatagacccgaggtctcgtttaaggtaacccttttctctttaagaatttgacgattttatatgtttttctaaatcaaaaatatattatattttgataattcctagtgataattgttaaggtcattttttccctttttgttaaatatatccagaaatttattaattcttaaaggtattaatttattgagagattataataattttgtaattatttttaaaaaattatctcataagaagtttttttttgtaattaatatctttataaaattatattacttattaaattttaaaaacacacaaactttctcgatgtaataaaatattagaaatgaactatttcgaaaattaatacaaatttaagaaaaatatcatatttaatttttaccaattgtttatttcaccaattgttagagtcatatttagggtctaatttatactccctccgtcccatgaagatggattttttagaaatttcacattctttaaaaaataatatataatgacaattttaatctcttaatactatttaaaaataattattaccatttatttaattatttaataagggtaaaataggtaaacagttctaaaaattacattggaaatataaaaaattatttttgtgggacaaatttttttcctaaaaaatttatttttgtgggacggaaggagtattctttaacacacatacaacgattaggatttatatacaaaagatattatcttcttttaattaattaattaatttatttttatttatttatttattttttaattattgtaagttaagattccattttcgcatctttttttttccgaatttccttttttgtaacattttctcaaatttttaatgaaatgtttgtttttttggtgggaatatttaatgaaaatatcacgaagtccaaaattgccacaagctgagatttttattttattttgcatcatcatcatcaatatcattcatcatcatcagacatcaggtgcgtcataagctccacaaaaaactcatccatggcgattcttagttacatctcagcaacatcaaccacaccaccaattcctcaagatcaatctcccaattctcgtctaccaaccaaaatcattctacccaataagaaacctgagaaatggtccaccggagttgctcccggagagtacggtggtcctccgactaccaccaagctccgaaagtactggggaggtgaaaaagaagatcccattacttccacagacttaatctggaacagagattttatggatcaaatgaagaaattgtttgatgatcctaatgattcttctctcgacccatctccttcaaaggttcaatctttatccccccaaattagctcaactttaaggtttcactaaatctctttaaggttttgtgattgcttacaggaaaagtcttctgggtttctgagctttagcagagttatgagtcttgacaggttcattctcctttaaactgataaaaattagttttttatttcttgcattttgattaatggttgatttgtttgttgttgttatctgtggaaaattagtatggatgttgatttaagtaaagagcttgcatcgtcttctaaatccgttgtgaaaaatcgtcttgacacctccaagtcagaagctaaaaagcaaatggtgagaagccaatttgacaaagccacattgctatttctttatgtctctgaagtttactcttttttgtcaatatcattagagtaaggctattgtgtctcctaaatggaagctggcacctacacgtcgtgagcaagagaaatgggatagagcaacgaaggctgcaactggtggcagtgtaagtttatctttgcaattgatggatcacttgtgctttgatttattaattctataccaattgaaatgtcattttcattgtaaacattgatcagaattggcaaaaatggatcttcttggttcttaattccttccttcatttctaatgtgtgctgcaggatgtgatgtttagggagctgagacggccacgtggtgacccagaagtacaagctgctaaagacagggaacaatattttaaggtaccttctttggttagctaatcctttcatggtatgacaaatatcatgtattgctatctcatgaaaaggcagcttgtataagcactactctttaccttcatgggcaactccgttacttttgaagcattcagttcctagtctcttgacttttggattgttttctgcagctgaaaaataagattcaggttctcacactcggtattggtggtgttggtttagtctcagcttatatctcatacaccccagagatagcacttaggtttgtcttctcatgcaatgaacatcaaaatctcgttaaggactttttaaatcaatcttaatttgtgttgaatattttgttacagttttggtgctggcttgttgggttcacttgcatatatgaggatgcttggtaactctgtagatgccatggcagatggagccagaggagttgccaagtactatatgtttctcttcaaattcttatcagttatctatgttgagaccactcactcactcacttatctcttttgttctttggtcttactgaattgattttatagaggtgcagctaaccagccacggttactagtccccgttgtgttggttatgatattcaatagatggaacgcgtaagcacctctctctccgttttgcattatatatctttcatccaaaatcaacttggttacatcaatcatatttacttgtgacttcttcatatattgcagaatacttgttcctgagtatggattcatgcatttggagttgataccaatgttggttgggttctttacttacaaaattgctacgttctttcaagctatagaagaagccatctccattactactcaaaaacccgaatcaatctctccagacacacaggccagtgattaataaggtcaaggtcagtgttgtaagaaatgtaattaaacacagaagtgttaatgtaataaaaactaataactcataaactcattcataccagcaaatcaccaagagatagatagctagaacatataaagcaaatgcagaaagagtgaaacatagaaagttaatgactttgaaatttttagaccaaaccgggtccagtgttggtttgagtgtattcttcgttgagtttgccttcgtaaacataaccgagcttctcacaacacttcttaatctctttgacatctttctccgagcaagtatcatcggaaacaacaacggtcgtttcgttttctcccgtttcatatttggcaactgcttgatgattcagaactgcaatcttgacgaccttgtcgtctccaaaagtagtgcaagaaattactctagcttccatttctttattattgtctttgggtttattactctgctttttggataggaataataaagagtataagggtgatggatggtttatatagagaacaatcatgtgaatgataattaatggtcaaatcacgaaacatgtatgcatgtaaaaaactgtaaatggaccaccagatttggttattatttgaacaataaagttgaatccctgaaattgcttcattttacatgactcaagttttccagttctctatcttagaaagtgaatgccacaacaacagtatagtgttaaggcacaatttcctatagttgtagtagatatatgttttaccttaggcaaccagaagaaaaaaaaaaaaaagtgttaagagttttatggtagatcgcaagcagaagaaaatataatataatttttttgtatcaacaatcatttatttgttctcattagtatatacatatgtatagcttaaaaatcaaggttatggctatgataccagatggtgtagataacacatatatttttgtttagtctaagaatgtccaagaatctatgttatcttattccgttaagaactctcaagttctagccacaacaagtatttaagagttgaaatgctctttgatttaattaaataatgccgtgcctttacaaagctatcgactatatataacaagataccaaacctaatcctttaaggaatcggaaactaaaatgcttgttgatcaagtcgtatctagctagagacttattatcacaacctaaaaataaaataaaaataccatactggcaataatgttaaataactcaaaaatcagaatgtaaactaaaagtctaaaaccaaaaaggaaagatgccctgcatcagtgaacttgaccaaagatgtcaggacaatcatcccagcgaccagaatctcgagcctcccaataacctccaatgtatctataagtctcacttcctttctctttactaaaccacgttggtttccagcctctctcttgtttctctctcgcctgtctttgcctttgttctaacctcaacttctctctgtttcccatttcaaactctcctttttccaaatacctttggtccggtctaagtctggaatctgttggtggcaacatttcctttaaatcaggcgtgagctcgtttaatgtgatcccaaaccgtgtaagattgtactttgtagggttttcgagaggtttgtttcgtttccacaaaagatgagattcactctcctttccttgattgaccatcacatagtacatactctcatcccattttccaaacaacttagccactgtttttccattcttgtcttctactataccttgaacttgatgcggatttctatccatcatcgactgtttcttgaatttaagtttacatgagtattcaccgttaccttcaatcagcatagtcccataatgatcacaatacaatttaccaagtatgagattgtatattgatgtagtcacctatatttttgagcatagaaggataagtaacatatcatccatgaatggttttttttttggttaaactaagattcataccttactccattgcacaatttcaccatcatcaaattgtaaagtcaacaaaccgataggatcgagctgaattgatcgaccccaaaatttgctttttaaattgctatctccccaaaatttccatccggtgccatcacaatgacatgccacaatcataggatgatgacttacctaacaacaaagttcacaagaaaatgttatgtatattaacttcacattaattagtgaatcttataagtttttcatataaacataaagaaaccttttccgagaaaaatcgaaggcctttatcgggataatcagcctcgtatgtttcccctaacattggattaaagggtttgcaaattcttcctttagttgatgcataaccagatacagcaaatgcagctacattcaaaatcctcataaggttattgccctgaaaaatatcattttctaggcaaaattacaagactgtcataaaagaatctaaatattattagtcgtttgcagatttttattaccctttttccccattcagaagctt

SEQ ID NO: 314 - DNA, 84872 bp, Arabidopsis thaliana
gaattctaacattgtattttatgtgtgttttttatgtcaacaacgtattatgcaatttaaacttggataatcatgcagataacactatacatttttgggaaatatagtcaacaagtactaccgtaccaaattaagtttcatctttcagttttcttcatgttaaaaagagttcgagacattctgttcatttatttggttaagatttagaaccaacagtcaataaacagctaatcatatttgttttggtcagtcttccttttagacccgacccgaccgacaatattatcgaaattttgacagtctatacaaggtttctattttgagctaaaacaatgttcttgcacttttttttatgcatgactcgaaaataatagattgagtgccataatgccacaatggctctaatgtgatcgacaagtatatatataaccatcactaacaaagtataaccattaagcattacgagaatttccttcaaacaataatattcaattatgagaatatatatgttgattggaatttggaagtggacattaggattttggcctttcgacttttgatatggaatcatggcctttccatatatggttagaacaacagaaagacctttcaagaatcaacatccatttattattcagatttacataagttccatcataattattcacatttttggattgatacgaatatttcatttaaaagaagaaagaaaaacaaattgaggagacaatcgacattgaaacgagggaccccgaattttccaaatgattctcttgtttcatcattacccacccaaacctatatttagtgaaacccttgtgagactccaccacatgcattactccaaaaattaacatctcttgcttctttaagtcaaatacaagatttgattatttatttttatatgtttttgtcaacatcaagatttgaatatatttttttcggaaaaatataaaatctccattttcttttatttttgaaagttataatatataacctaactaaatcgacatcaatgaaccatttttggtttttggatattaggaaaaattattacgtatctcataccttttttttttaaatatcaaaaatatttataatcacaaattctagaaaatacaaatcaaaatgtaaaaccaataagctttttgataaagtagacaataaacttcctctgattattgagcataggcattgtataacaagttcgctggacttacacaaaaacgaatagtacaagaatccaatgttacttctttaatcttttggtcgaattcaacaaaactgatacaaaaatactatgaaccactaagaaaaagaatagatattgtagtataggattaaaaactcaaggtgtagtagttacaggttcttgaagtgcaagaggaatggctggtctccaagttgttccctcaggactatccatcaaagcgatcccaacttttgccaaatctttcctaattgcatcagatctttcgtattctttattcttccttgcgtctgttctctcttgcactctctgcaacacatcttcctcttttagtccagctcgctttagtgccttctcttttagctgctcgagaacctctgagtaacttgtgggcataagccctaagatagtaagaacatctctgattgttgtctctagagccttaagtgactcttctcttcttgcttgttttttcccctgaaaatggaatgatcaactatatcattaaccggttataaaggtttataaacgtaaaagcagacgttatatttacctttcgggtgtgaatgagatcgttgatagttttcagtggttctgacattgcagccagagttacaggtgtgagaagatcatcagacatcgaggcgacaaattcagtacggaatgtgttgatgcttgtcaaagtgtctgaaggaacagaaccattctcaaatgtcgaatctttctcgcctaaagcgctttcacagtcgtgtaacgtctgtcaataagcaaatgagcatcgtcaaaggattgtagtgaagaagaacataatgttctcttaaatgttttttcaatagcctaattaaagcatcttaagctaaagaaacaagtgaggtactccaaaatgcaatcttcaatccgactaaaagctatataacgagggattacctgataaatataaaaaatgcgctccgaagcactctcgaggaggaaatcggagtaattgataggagaccgataatgagttcccattaggaaaagtctcagagcaagaggatgataaaggtctataacctgccatgtttgtaaacacgaaatttaggcataaatattggatgtaagaagaaaattgcaaaactgagaaatgtttacctgtctgatagtgaagaaattccccaaggattttgacatcttctcggagtcaacagtaacaaaaccattatggatccaatagctaatgttgctgctatcacatgcagcacaactctgagcaatttcattttcatggtgagggaacacaagatccattccgccaccatgtatgtcaaaactataaccgagataagccgcgctcatcgcactgcactctatgtgccaaccgggccttcctcttccccacggactctcccaaaagggttccccttcttttgcagcctgcccaaaaattcagaagtcttttaagacttaaatgagtaaacaagtattcaatgtagggctaaaacgtaactaaaaagcgtactttccacagagcaaaatctgcgggatgtttcttcctcgtgtcaactgcgactctctcacctgcacggttatcttctaattttcgcccagacaattttccatatgttggaaatttgtcgactgagaagtaaatgtctccatcaactttgtaggcatagccattatcaagaatctgaattggaaaacatagcatatgagaatatatcttagatttttagcaacatgaggagcaaagtgaagtaaatgtggtcaaacctgcttgatcaggtcgatgatttgaggtatatgatctgaaactcgtggttggacagacggatctaaacattgaagctgttccatatctcgattaaattcctcacagaaacgtctgctcaaactgattggatcttcctctaattctttcgctctggcaataatctacaaaatttgaaatttcatgagtcagttgcatatgtagctaaagaatctagccatatacaacttcaataagaaaaagtgaaagttcccctagaaaatatagtcagagagaggctgaaataaagaaaacatttgtgaaatcttgtagcacaatacggaggaaatctagtaaaggacattactaattagttctattcttctagctaattagtctgtgttaaggttaatcaaagttggtgacacaaacgtaggcagatgtaaaagagcagacacatacataaaggataaaactaagtgaacttctccctaacaaagagaaaatactgactattctccattttggcatttcatagtacaacattttcactagcctcaaccaccaatataataactttagcagtctaaacgttcaaatcttgcaactttgatggcactatgatccatccttttacatgcctctcacaagtaaatgagatgaaataacagtattggagacactagaaataagatcaatcagcttcaacttctctactgcccaatatgtagccgccaagaaaataaataacttaaacgcggtccaggaatgccataacagacactggctactcatcctattaacctaacggtaccacaaaactcaatcttaagaggttctcactaaaaaactttcctgaacgaactcgagaagctgtctctaaacttctaaacagagcttaagttgtataagacccctgaatctctgagctaaccaccaagaagcagagttagctcaccttgtcatccacatccgtgaaatttcgaacgtaagacacttcatatcctagatgcttaaggtacctgcctaattcccaatcaaattcaaaagaacaaaatcataaaaaaatcataactttccataaacccaagaagttttaaagcttatttctccaagtcgatacctcaagagtacatcgaaagtgacgtagactcgtgcgtgtccaatgtgactgagatcgtaagcagtgacaccgcaaacgtacattccaactttaccttcgaccttaggcttaaacagctccttcttccggctcatcgtgttgtgcagccacagctccttcccaccggaaattggtgctccaccgtccgttaatgatgacagagtcgtgaaacagcgacgtagttgagtttcttttccgggtctgaggggaaattggattctgaattgagacttgggaagagaagagaagcgtattggagtgaagggtctacatgatttgaagagattaaggacagaagaagccattggtgtggaacgataagctccttccgaagaagatgatgaaatctcggataggaaaaagcggcgagtgattagctaaaacctctgaactaattacggtttgtgtaaaccggttttattttccggttcggtttaatcaagacttgttagaggagcaccatcttggttgttgacgaaattttttaaaatgtctaggtttttcaaataatatatgggattgtctattagccactaatggaatattgaaggaaaaaagaatgttttagtgatgatgatattggaattaaaattaaaatttaaagaaccatatttcgatgtgatattacgtatgcgtaatcgttaactataatcgtttaatctactcacgtttttgtcattttgattttcttaaatttttaagtacgaccggaatggtgttattgatgttttcgtaggaaccatccataggttttaattaaaggtctacaaaatatagtttaaaagtccttaatattttgtaaataatatctagttgtctactacaggaccttggaccttatatgttgaagttttgcaaaacattgatcaactagaacaaaaaaaattatcacaaaaagtttagggcaaaaccctagtgtagatcaaccagctaaaacaaagttaaggagtgaggttggctcggcgatagtatgttctctaataagttcttgggtttataattaggacaaaaggaaccattgttatatgttcaaaacgtttaacaatggttccttttgtcctgattataaaccaggatgaagttattagtctttacacacttaggagttcattttagattgaaaaccacaattcaagtcgacccatttctaatttctttttacttcagttaacatttatttctttagaaaccaaactaaccgaaatggccctcttaaaagttttatttctttcatattatatacatgtttgaatctgggtggtaacatggtaaagtgatgttacatgttcaaactaaccattgctacatgtcttgatgttatcttaaatgatgtttattatcaaaatgcatgtaagatattcatatttacatgcaatctcaaaagtctacaaacatagacagagaggaagaaaaagaaaaggaatttattcatttggattacaaaaagactttcaaagtcttaacgacaaaaacaacacaaaatcaaaatcaaaattaaaactcgggtatgtcggaaaattcctcaattctacgattactagtgaaaacatcaaaccaaaactccatgtcatcattatacaacttagaattactatagctacattttttactatttctatcgatcaatccttcccaatcctctatcttcttctcattcttattcgaattatctaccgatatgacgtccgaccaaaaactatcatctatcaaggcagaaatatcctcgtacgacataatatcgtccttgttatcatttgaaatatcaaatgttgtaatactattagaaaattgttgtaaagaggctgtgtcgactatcacagatcctttgtcttcatttgtggtctcgttaattccgttaacgtctttggtgtctccgccattgtttagatttttgctgagtcttttcttcaaatgagtgtgccaaacattttttatttcattgtcggttcgtcccggcaattttgcagcaatcgcagaccatctaaattaattaagaaacaaacaaaaaacaaaacactttttaaaaaagcgccccacgtataatagtattgtatggatttcatcaatttcttactttatattgctttttagttgctcaaaaacagaagaaaacaacaaaagaaaagcttatacatgccatatgttttgcattgatcaaagtgcatatccttttttaatagtaatatagaagatcttgtttctgttttttttttaaagtatatttgaaaacaaattaatgaagtctttggtttggtttgagacagaggaaatcacggacaggaatctccttaccacccccatggtgttaaaatattttgcaaattgttacataaataatcatttattaacttagactgggtaatactcacttctcagagagtcagtgtaatgcaaagtggaaaaaggaaaaaggaagttgacattacaaaaaaaaaaagaaacgtcgaccctaaaactgtttgatttctcaatcactctttaggggaaaaaagaagacaaacctgttgcctaagctttcatgcagattgataatagtttgttcttcttgaggagtgaaattgccacgtttaatgtctggtctaagataattgatccaacgaagtctgcaacttttcccacatctaagtaaacctaaacaaattgcacaaaaacaccaaccaaaattgcttcattttcaagaatcattaatagataatcaatatacaaagtaaaatgtaaaaaggaaactcacctgcgtgttttgggagagctcgccaattagaatgaccataaagatgaatataattgatcaagatttgatcttcttcaggagtccatggtcctctcttcacccccattttctcacaacatggtgctcttcccattcttttttccgttgccccctcaagaaaaaaaacactcagaaaaagaaaaacaaaatggtcttcaattgagtaaaatgattagaaggacaagtgttgaatgggtatgaagtttatgagagctaaagaagccaaatgcttgaaggaagtatgcgatgtcgacgtttagtgtgttattatatatacacacatattattattatataatcacaatgcaaccgtgggacaactccaagttgaaattttctcatactaattttgatctacacagtccaaagtttttaacctttttcctttgaactttttttttagattcattaaaaaaaaaacttttttctaatgtattttaatctgttttgatgaggtcgacgaataccactggagcctcgatgtcctgtaactcctgttgtgtaaagattgcctataattcaggtgccattcagtagtaaaatatttaacggttaatcagttcgactcaggccaaaaggattctctttatatatcaccagatagggtccaaaactttctatttcgggatatttgcaatatttttgagatgcaacacgcaaccagggaaacgagtgtgtgatgagaagcaaaacgcaaacatcactctacttatgcaattattgccctgaattatcatgttctagggacgctagtttcactaagcatatgagtcacatgattcatatgaaagatcgacatatggtcgacctgtgtacccacttcaaaagttaatgacccgatatctaaatctattattgaaaaccactgttatacaagctattattgaaaaccactggtatacaagccatgatccgtttacttgattggttatgacaaatcttaattactattaaatatatctatcatatatgtttcatattctttttggaacaactttattggataagttggttttgatatgtagtcttttttttttttttttttttttggacgactggttttgatatgtagtctaaatgtttaatatggtgtgtttgtatttcacaagcttgctccattctagtttacccggactcccgctcggagcctcggattacggagttatataaaaaagatattaagcaaaaaatgctccaatataaataataagaaattaggaaataaaataatataaaacattatgagaggaaagaaaggttcaaattatatatgcataaaaatgtcaaagaaagaggctcatagtgctcaattccgatcaaatcatgggccaaaaataatcaaacttttaatctcaatcaagcttgttgggtgacctataagtcaataagaaacattaaaagtttcatatttttctatgcgcatattaaacacttacactattttctttcttaatgtatataataccgttacgattaattaaaaaataggtatgtagagccaaaacaattgtggtgtcaagagggaaaatcatagacatcgaagtaggtacggtacgtacgtaaaggggttcctcttttctaatatgattcagagaatcagaggtcatattgttaacaaaaaatttttatgaaatgatttattagctagaatatgatttgatgactccactttttggtcattgttttcccgctttcttttaatgttaaatatgacttgatactacatctgaattgttttggtcatatgaatctttaatttcgaaagagtatttataattttactttgtaaatacaaatttaaatttattaaattaccggtgagttagtaattaaaataaaatagacaaccagattattttgaaacacgtcaattattcatagtgtcataccgtaaaaaaaaaacagaaatgtctttcttacggtatatgtcattacgtaagataattacaaccatgagatcgtaaaatgtatgaaattgtcgtcaattgatatttagtgatatggttcttggcttctttcaattgcacaccttcactcaccattacaacatttacttttgagttaaactattcgtttgtctctgtcaaaagcaacttttgtatactgtttcaaattaaacgtatttagaccaagattacaacgttttaaaaagaatagactaaaacaaaacgaagatcgtcgatatctaattccatcattaccaagatcttgccctttttcacaattttttttttctctttccgttttctttttggggtttcattttctaatacaacgagggttatcttctcttacaacactactccaatataattgtggagttcccatgtttttaatgcaagtgttttgtttgataattgataaattcaaatggatcgtgacctaacgaaatctagatatttgtgggtccattcaactactaactttgtcgcttctttttgtaattttccaagggtcggctgatttgcattattgattatacatgcatgtcaaaagtaaagaagccttaaacatttcactagttaatatttaaaaaggtgttacttatcttcttcaatcagatccaactagctatccctaaaataaaatgtctcaactaaattttgaaatctgtataagaataacaaagtaaacattttcatcacttaacaaattgctaaataatcatgaaaggttgaaatgttaattttaatacattaatgacatttttattttctgtagttttttttatttattaacaacatgcataatgataatttgaaattaagtttggtctaagtctaaccaaacctgaaacacaacttaaccaacaaaatcttttacctcctctcatgctctatcagaatcttactagttatgtgtccagtaggcagtagcattggctaaccctcgtataaggtagttctgataattgcatttatcaaatattatatgtaacaacatgcaacaaaagtgatatatttgggacattttcactgatcaaaatatcccaaaatgaagactaaggaagggtccaggtctaaggaaaaatagagcccgtacacaagatttgaccaagagaactattttaactttaaataaatatatatatatatatatatccataaaaagcattaatcagattccattttgattgatatatatgataaaatatgtaaacttacaatggcaaaacaaaagtacaaacgaggacaagaaccgtaccttcaaacttttgtttcacctaacaatctcactctaatctaatccatctaagtcttcaaagtactagattgtggattcatgatctggataaagacttcttacgcctacaaattcgtgtttatacttgaaacaataaaaaattacaatagcaaaattactcgaaactcgggagctaccaagcaaatcttgtccccgtgccatcgagaaatctatcagtataccatcctttagcttgcacttgagataaaaatggattgaagacatcgttcattttgtcatacgcgtcttgcaatataatgtcatcagggtcattatatatctttgtcattgacttgacatatgctgcaactaaccaccctcgcaatgcatcttcaccggttgcatcgtgctctaagaccatatcggtccatgactttccatgactcaatagaaacttctcttctacaaacacttgttttagtctttgtacctcagaaggcttcacagctttatggagagcccttcccacttttacatttcctgcgtcttggattggtctctcggggaacattaggtcttcttggaatcttaaatcaggagggcttgggactttaccagtctgagaagatacaacaacacctcttatgtaattaaaagaaatcaacaagatggtttacagaaaaattgaacaaaagatgatgctaattaccttgagaaaattagccacaatcaaagcggttcgctgtggattcagtgtgttgattggtacccctcgcatttgttctacaacgctatacacatgtacaaccgaaagaattgacccaaccaccaactgcagatatcagccttttcataatagagttgcaatccaaacaaatagaaactgcattttgaaatagagagtaacgatgtagcagaatgacattacctttccctccattgatgaacatattgtggacgcaagttgaataccagcacctatcccggcaacattgaaaagagtagagatagcttctccttttgcaaaaatgtcactaagatttccttctttggcaaaagatgaatatattggtaatcttgttgcccttgctgcaactgtagccattccctatttaaaacaaacaatgccagaaaagtatgaaaaacaggaaaccagtgaagctgattgatgtataaaaggatggtctttagaaagctaatatatctcataggtctcctattgaagctgctgaggaaagcaggcacagatgttctaagaaagatatctataccttagcaaaattccccagaccagccatttcaagaaacagatgcgggcataatggagaaacgagttccagaccagtaccaagatcgtaaagcacgtcagctgaaaattatgaatcaatactttttatagttaacgctataaagacatcagcagaaacatgtagctacagaatggtgcatacccagaatcctccaccgtttaggctcagagtccattcttgcacccaaattgctacatattagctttccgacatgttgcatcccatccttcaatatctacagaaccaatagagtaaacaaaactttcacttacggacagggactgaacaagcaaacgaacaaacaaactgaagtggtttaacatacccagctaacaacagttgcttgtgccggtgtaggccgcaagcctgcagcaaacaacagtgactgcaaaggaatgatacaaaaaaaagttatgtgtccatgtgaaaacctccattacaacagctcaagtaaacaaatgcaattttcccaaaatcaataatcaaagctgaatcatgaagaagacctgagtcgataacactgataatgctgcactagagaaatgctgaagtgctcgaaactgtgtgtacctaagatatccttcgttgacactatagagaagaagtaaagaaagaaacttggttaaaacacatgctttaaggctaaagcctagagactctctaaaaacaaaagttccaaactttgagttcacctgtatggataaccagaaggaaagaacttgttaaggaaagattcaaccatcttctgaggaacaggtcttgcatcatcaacaactttcatctaaaacgtgataattcacataatgattctacaagttgagagcaatggcataagagagacaagaacgagggagagggagatttacagagaggtggccgtcggattggaactgataacggtgagagacagaatcagaggtttcgaaccagtaaaccggaaagtcttcagggctcttcaacattactgggtcttccttctttatcaacttcaccttctcctgcttcgttccccaagttacaaagtcattcactatagtttggagaatcataaaatgagattaaaaatacaatagaataaagattgtgaaatcctacaagaaactgcatctctgagacacgatggcacagtcaggttccgaacgttaagagtcgccggagttggagtgaaccaccacaacagtaatcgcctagagccgtctaaaaacaaaatcaaagagattatcttaacaacgacgtcgtttcttcgttccttttctacttctgaggcccaaatgatttttgttactattcactaatgggcttaattaaggcccaatattgatagatacgcggcgactagttaaggggcaacaaatatggcccacttaaaaagaaacacgacttttcttatcgcgttgttctaacgccaccgaccgaacacttctttttcttctgcaataaaccaaaaaaagttaaaaattcaaaaacttaattactaagcaaaagtgtgcacgaagaacaaagcgacgcatccgattttatttgtttgataagttcgtgtcgtcttcgtctctctaacccaattctgtggtgtctgaagaaagcagaatcaaatccatgtctttcagaggacttagcagggtaaaattacaaaaaaaaacttttctcttcttgcttaaaatcgatgtactcttgtctatgtcgcaagcatcttcaatgttaaaaatttgatttttatgaagtcgatgttaaaaaaaactaaacccatctccatttttactcttattgagggtttaagatcactagatgaagtcaattcgatgaattttggattaaaaatcgaatcttttggtatggttttgatatgtgttttggttttatatctgtagccaaatgcaatatctggaatgggtgttgcagatgagagcaaaaccacatttctagagcttcaaaggaaaaaaactcatcgctatgtggtcttcaagattgatgaatccaaaaaagaagttgttgttgagaaaactggaaatcctacagagagctacgatgatttcttagcttcacttcctgataatgactgcagatacgctgtttatgactttgatttcgttacttctgagaattgtcaaaagagcaaaatcttcttctttgcttggttagtttgatttttaccattagtaagtctataagggttttgatgtgttgagactaaaacattttgatttgggactactgatgttgtaggtctccttcgacctctggaattcgagccaaggtgctttactcgacttctaaagaccagttaagtagggagcttcaagggattcactatgagattcaagctactgatcctactgaggttgatcttgaagtgttacgcgaacgagcgaactgagagcaagcaagattgctatgtctattcaaaacttatggtaatgtaatgaataattcgtattctctgtggattgatttgtgtaaacacagtttcatgttctatgtcaaactgtataacctctggtgtttcagattgcacaacctaaagcttaggtaaactgaatatggtttaagatcgtaaaaggttgatatattagtaatgttaagagggagaagaaacttctctttagtagataacgagaatgttgatgagcatgatgagagagttcttaaactagtctagcaaattctgtataagctcttgttgtagccatcttgaattcgagtctaatccttgcgaacaatatagaaagtggtagtgtgtaaagtttccctcatcatttgtggtttctttttctcactttcttcggtgtagtaaaatttaagttgtatgtataatagttctatcatatacctgctttctaaaacaaaacaaaaaaaacctctttcttgtttccgcatatccccttccgattccattgagagcaaaaccattttatgaggttgtatacttaacctaccattcctaattcctaattgcttaactgttaccaaactgtgatgtcaaaaagaaaaatgttaccaaactggagtcaaaatgacataaatacccttgaccatttgagaaaaaatgtaaggaattaggaggttgcaagtggggtccattgccgttgtggccaaaagcgagattgcatgacccaactgaaatctcaattaggaaggagattgcattatttttatatgtttatttatcatatctcatattaaggtccatttccttcagtctattatcatcatgtatccactatttgtttgacattggggaacattttagaataagaagtggaactggaaagtaaaatatatctattagttccaacatatttcattagttttaatttttcttgctccaaactctagtagtttataaatacacggcttgaattacgtttaaaagaaaataactaaactttctaataattctccaaatattagaacatgtcttagtaaagaattaaagctttgtttgtgtcagaaattaaaggttggaaccattttgttctcattcataaaagggagaagaaaaaaaagaaaagaaaaattgtttcctctgtcttgaagtatttagtagagagctgtccaaaacaatacaaacacgtccaaaaaaccctctcctatgggaacaagaaagacccaaaagacacaaacacacacccaaactccatcaaacagaaataaagcaaaccaaaaaagcttctctcttttttcctacatttgatttaagctctaaatgttgaaatgatctttgatttgacattgtgaagctgaaatatagctggtggtaaccttcaaagacgacaaagaaggaaaaagatcatcatcttctaacttttggtaattagataatttcattctctaaacaaagtctgatttttgaatcaatactaaaaaagtgatagaagagaagctatcaaaacacaaaaacagaggatttttcttttccaatctaaaagaaaggtgcttaagggaattagtttgagattaggttttaactgagtttatacaaactttctttatttaatgaaattaacttagattggcttttgtcttaaagattaattatggttgtgaaaattagttttggttgcagaaaaaaatcagttgaaaatgtatgaggaaagttcatgttttgatcctaattcgatggtggacaacaacggcggcttctgtgcggcggaaacaacttttacggtaagccaccagtttcaaccaccgcttggaagcacaacaaacagctttgatgacgatcttaagctcccaacaatggatgagttctctgttttcccttctgttatctctctcccaaactcagaaactcagaaccaaaacatcagcaacaacaaccatttgatcaaccaaatgattcaagaatcgaattggggtgtttctgaagacaactctaatttcttcatgaacacttcacatccaaacacaacaacaactccaatccctgatcttctcagcctcttgcatttgcctagatgctctatgtcattaccaagctctgatataatggcgggttcttgcttcacgtatgacccgctctttcacttaaaccttcctccacaacctccattgatcccttctaatgactactcagggtacttgcttggtattgataccaatactactactcaaagagatgagtctaatgttggagatgaaaataacaatgctcagtttgatagcggaatcatcgagtttagcaaagagattaggcgtaaaggaagagggaagcgaaagaacaaaccttttactacagaacgtgagcgaagatgtcacttgaatgagcggtacgaggccttgaaattgctcattcctagcccgagtaaggttagttatttacttatgacaacaatctttcttggtttagcttcattcattatctccaatggcactttgcttaattcatattatatgttatttagggagatagagcatcaattcttcaagatggaatcgattacatcaacgagttacgcagaagagtaagtgagcttaagtatttggtagagaggaagagatgtggtgggagacacaagaacaatgaagtagacgacaacaataacaacaaaaacttggatgatcatggtaatgaagatgatgatgatgatgatgaaaacatggagaagaagccggagagcgatgtaatagaccaatgttcaagcaacaactcgctgagatgttcatggctgcagaggaaatcaaaagtaacagaagttgatgttaggattgttgatgatgaagtaacaatcaaagttgttcagaagaagaagatcaattgtttgttacttgtctccaaagtacttgatcagcttcagcttgatcttcaccatgttgccggaggacagattggtgagcattacagtttcttgttcaacaccaaggttagtgatcaatgaatatatatatatatataacaaatcttggtttatggattttgatatatactggatttagttttggtaataatgattgaataaattgcagatatatgaaggatcaacaatatatgcaagtgcaatagcaaacagagtgattgaagttgtggataaacactacatggcttctcttcccaacagtaactattaattgttaggctaacttcatctattttctaacgttttttaatccatgtaatttttactcatttgcaaaactaaataaaaactcattttggatgatttggatgtttagtttctaacaagatatgtatgatttggatccctcaaatgagccaaagagcctacaaattagaagacctaaaggaatgaacatattactcaacatcataagttcatcatttctatgttagatttgttatcttttcgttaagctccgagttttttctatattctccaaatatctggaggcaacttttagacgattatctttggaatgtccctctttctaactgcaatccgaactaggcatatctctttttcaatgttcttgtatatgttctctttaaaaaattaaaaaccagtggcagaggcaattgtaagggaatggggtcaactgacccaacaaaaataaataattaaaaaaaaaaagaaattgtaagattgaccccactgaaaattttatattgacccctataaatttgacttatgttttacttcaaaaaaaaccctaaaaccccacattttttctagaaaccttataaaatttgggtttacagattaagattaaacacattcgcttactaaatacattttcatgtttttcttttattaaaaatttgacccaataaaaattcgtcctacctcggccagtgaaagaagccattaaaccaagaaacacttggtatttctttgttaaaattgatacaaccatcgttatggttccaaagtttgtatgactaggtaggttgggaacaatagcaactacttctgtacttgtgtacgagagaagtaggtgacaagaaaattttcagtttctataaagttacgagagtatccataaatcatcacgttacaaaaaaaaataaaaaataaaaaataattaaatatgaaattatattttcacatttttggatgagggacctacctcttcatcttctttcatactgctataaacatatatggcatgatctaaccgcaacataaaacttataatatttttctagcgtttgttgatattattaagagagagacaaatagatatgtttctcaatttattttcttcaaaacagttaacgtcgaaatttggacattctgaatcatcgcttctacgagtgtgatgcacatagataaatgaggttaaaacgaagtgatatcatgaatgattattggggatgaagtagtaattgtcaatttattaacaaataatgaaaactttatatgtaggaaactatctacccaaatccctcatcttcgatctgtttgttgtttgtgtaatccagtcgaagagttattcaattgtaaagataatatagggtataatttcataattttttcagcaaaagcacaactttattaagctaaaaaatagacataaaatatgtttaacaacatctatttaagacattactgtgaaataggttagaaacatagtgctaattaagtcaagtcaacattttgtgtcctaaaaaaataaaataataaatttgtgtcctaagtgaaaaaaaaatagaaaattttaattccatctgcaaatctccttatattcaatcaaaatacagagagggagagacttgttaaagaaactttgtttcttctcttgaaattgataatcttctagagtattgaaccatcttcatggaacgttacacaaaaaaaaacgagaggttcaaggcagaggaaggaaaaggatcaaagaagtcgagaactttccttacagaacgcgaaagacgagctctcttcaatgaccgtttcttcgacttaaagaacctcattccaaatcccacaaaggttagatatatatttttatgtttaatctttcattctttttcgtctgtttaatctttcattcattctctccaatatctcttgatcaatacacatgctctattactagggaggtgaagcatccattgttcaagatgggatcgtttacatcaacgagttacaaagactagttagcgagcttaagtatttggttgagaagaaaaaatgcggtgcaaggcacaacaacattgaagtagacaataaaaacacgatttatgggactagcaagatagagcatccattctccaaaaacaaaaacacttttaactgtttgattcgtacacttagatttgtacaccacttttagtgtacatatatatataaaaatacacaacgtacactttacatttgtacactaaaagtgttgtacaatccaagtgtacgaatcaaatagtgaaaagtgactactttgcaaattatgaatagtaaagtgactacttttccaattaagtttgaaaaagtgactagtttgccaacacacccaactttctttagagctgaaaatgtcaagacaatgttatataagaaagatgaatgcactttgattacggagaaagaaaagaaggaatgattcaaagaaaagaagcagtgatgaatgatgaaattcatccccaaccccaagcatctacgatgaagcatcatgcataatatataagagtgatcaaattaatcatagaccactttgaatagacttgtctattgttagagatattgtgacgtgtgttttagaccggttaagtcgggtttgtagaccgataatttttagagaagtgcaggccctgttaaactaatatcaatttctatgaaatatctgtagtgcaaccgtcaaataaaataaaaatgatacgattcattacctaaatgaatccaacccaaccccttttctgaaactattggctatgtatggaccgaatcaagcggcactacatttttaatatatcaaaaaccaaatcgttggtttggtccggcaatacattttaacattttctgagtaatcagagtttgtactgtttagttaggatggggacagtcgcagtgtaccgtgtacgagagaggtaggtgaccagaattttttcagtttctgtcgaatttcaagaataaccctaattcttttttttactaaatcaaatataaagtatattattatcccattcttggatgtgggacctacttccactacttctcaaacaacccgctctctttgctataaacagaaatcgcatgacccaaccgctcaacaaggaaacttatacaattagtttgatccaaaattgttatttatttagaaaaatttaatagaaaagattgaaatataaacatatatgaatgaaatgaattatttatattcaatacagtccatgttatttttttaccagattctctattatacatctcttcaagtatctaaatatttttcttatggatgaatttttattttatcattttatgttatcgattatacacaaagaaaggaagtgttaaattagattaattaagtgagttgtcgatatacattacaggaagtgtttgagatagaaactattctatgatggtttagttgttgaacacagtttacttataaaattagaaaacccaggggtttaagtatttatacttctatttaactatgatatacatacataagttttatcaatgccatgtacaacgtatagatgaatcaaactagatgatgtgataaataattccatgattgttgatgataaggtagttaatcatccataaattaaaactgaacactttttatatacaaaacatatccatttaaaccgtgcattagtatttttggttcttgtattaagtcgaagagttttttcaattcgagtatataataaaatacgattgcataaacataacacatattaaacatgagattaattatagaagtaaaacatacatctaagacaagaaaatagtttcgcgttaaaatacttttatcaattacaattttgtatttgggatatttttatccaaattttactaaaatgaaaggaaaagggtagaaatgggaaagagcaaacggggctacttggtttgtcggtgtgagttagtggagcccatatcatattggtcagagagaagatcgtatttgctgataatgacggaaatacccctaaagtcgttgaaaagacctgagagattcggcaagggacccatctgttgattcttctaaccaacctttatgtttggccacaatgataaatcacatgctccaaccaaaacagcccccaaaaaaaacccaatttatattttcttaaaagtgagcttataacgtaaaagaaatatatacaatgctaattttcttacaactggttaagtgttaaaagatatgtttaggatcatattggtatttggtaatcaggtttcaacatttgaaatgattaatcaaaaaataagttgcatagaaaatgatttaaaaaatgactataaacaagaagtaatttcacaaaccatgtaacaaatcaaaaccttaataaatcatgcatcaaagttggattagaaacatagcttaatggattatatacaacattttcgtttaaattagacacctagaatatacatgttatccaataatttaactttgccatctttttacccttattgtattgtgtgtctccatctacaaatgtccgtatatttcaaacacagagagggagagagagactcttgtttaaaaaacttacttcttctcctgaaaattgagaagacagacgtagagaagaattaattgtaacaaaggttctaattttcccagctctgattactcattatcttacatctctttctatctattgtcaaattcaaacccttaacccaatgtttaatcttttggatcctaacaaacatttctatggtttcgtttccaaaattataaaagagctaactttttttgaaattagtttcaaatttttggtttttcttcttcttaaagattgttgaatgttacttttgatttgcaggtgttaaagaatcatctagagtactcgttgaaccatttccatggaaggtaacaaaatttcattatttggtctaatttctcatgaaagttgctacctttttcgttctggaagatctaaattagtgtttgagttacaaacgcagaagaaagagaaagcctttacgaggaaatgggttgtttcgatcccaacactccagcagaagttacggtggagagtagcttctctcaagccgaaccaccaccaccaccaccgcaagttctggttgccggaagcacaagcaacagcaactgcagtgttgaggtagaagagctctctgaattccatctcagcccacaagattgtcctcaagcttcttcaacacctctccagtttcacatcaatcctcctcctccaccacctcctccttgtgatcaactccacaacaatttgattcaccaaatggcttcacatcaacaacaacactctaattgggataatgggtatcaggattttgtgaatttgggacctaactctgcaacaactcctgatttgcttagtctcttacacttgcctagatgctcattgcctcctaatcatcatccttcctctatgctacctacctctttctcagacattatgtcttcttcttctgctgctgctgttatgtacgaccctctcttccatttgaatttccctatgcagcctagagatcagaaccagctaagaaacggctcttgtttacttggagttgaagatcaaattcagatggatgctaatggaggaatgaatgttttgtactttgaaggagcaaacaacaacaatggtggatttgagaatgagattcttgagtttaacaatggagttactcgtaaaggaagaggatcaagaaagtcgagaacttcccctacagaacgtgagagacgagttcacttcaatgatcgtttcttcgacttaaagaacctcattccaaatcccacaaaggtatatactttactttgctttgatttcaattcatgttgttaatgtgtatgaggagactatgaaatgagagacattgttggtttaatctctgtagattgatagagcatcgatagttggagaggcgatagattacatcaaagagcttttaaggacaatagaggagtttaagatgcttgtggagaagaagagatgtgggagattcaggagcaagaagagagctagagttggtgaaggaggaggaggagaagatcaagaagaagaagaagacactgtgaattacaagccacagagcgaagtagaccagtcttgcttcaacaagaacaacaacaactcactgagatgttcatggcttaagaggaaatcgaaagtcactgaggtcgatgtacgtataatcgatgatgaagtaaccatcaagcttgttcagaagaagaagattaactgtttgttgttcaccaccaaagttcttgatcagcttcagctagatcttcaccatgttgcaggtggacagattggtgaacattacagcttcttgttcaacactaaggtaatgaaaatgtctcactaatatagttctgttattaactccaaaccaataaactaatctttttcaatttggtttgaggcagatttgtgaaggatcttgtgtgtatgcaagtggaattgcagacacattgatggaggtcgtggagaagcagtacatggaagctgttcctagcaacggctactagattccagacacacttatggagtagtttattgctttttaataacttttgtgatacccctctaatgactgattaagttattaatcactttggtaattttcaagtttatttagctagagttaaagttagagctagagctgaggctctttgtctggattttgtctaactctatatatttcttctagctttatcggtttcgtttttcgaccacattttaatctcttgcgtttttttttttaacaaatgctcttgctcatatttaccttacgtttcatattgctcttaatgggccagtgggccgtgtcgtttgaaaagtttgagaataatcatcagtccggaatttataaaccattgcttctttatcgattctggttttctaactagaaattaagaaacttgcttacattttcagtggttctttttacaatgagccaattttaatctggttctttttacgatttttcatttaccgttgaattacgtgtttaagcttttatttaataatgtgtactatcaattaggctttgacaaaacaaaaaatgtactatcaattagtgaatgttaatttgttttagatctaaaacaaaaaaacaaggatgtgattttgtctcaacgctcttgtctttgctcgttgtctgtcaccctttttgcttattccctatttcgaacacgttcatgtgtatttttttgttttgaagtctattttcacatttaaaataaagtatgtctgtgaaaagcttatgacgtgtatcacaattttaacttactaattctggacaagcatatcacttgataattatatatagcttttcacatattcacatttggcaaaaggaaattaaaaaaaaaacggtaattgtggttggtgacggtttctctaattgttcaactccgttattgccattccgttttttcgtttatcctcaaagaagttgtaagcatttaactgaggtttgagggcttgtctaggataggagctgctcgtggaggccatgatgaagacttggattctttggagttgagggatcgggttctttagagctaaaccaatcacgtttttaaagcttttttctttaggttttcagtatttttctgttaacagtatatgtttatttattttttgtcaaaatttcaaataattgtatcaatacttcaaactctaccaaaaaacaaaaaaaatctcgacatgaaattattttaattccaacgtccatggtgaatcttaagctttattaggttaagaatgtttcaatttacgacatccaacaaaatatcgacatgtagaatttgattttatcgcctatggttaatctttatagcttattgggttaagaatgtttcacacacaaaaaaagtaataagaaagtcaaacagccaattaataatgagattaacaataatgatgataacgaaagcatcattaacgacgtattaacacaatataatatgaacgtcataatgatattttatataatttataatataacatttatacaatataacaggaacgtacctttatagatctaatcgaattaccctacacacacaaaacttaatagtttatcttatcaacttctttttggttagattttgttattcgaattaagaataactttatagcttggatcgacttgattgattttttaagattcacagtcttagatttacaggaatcgttacttggagaaatttatatcctctaatatctttcacgcaaaaaatgaaaattattaaagcacaaaaaaaaaaaaaaaattaaagcaattaaggtggacacacacacttttcagccatataacgcaataatagatttttttttcatcaagacaaaaaataagagttttttttttatatatatacactttaacatcaccatctcttccaataatttcatttggatacaacaaacaaaaaataagagaaccaaagaaattgcagaatgaacaaaacaaatttcaagattaattatcacaaaattaaagtttaatagtggcttttgctgaaatcaattacaagatcaacatgagctcataagaagttgttctaaatactcagcacctaaatcttcaaaaaccacaagtgtaccactttcttgcttcacaacactctgcttactactacttcttgatgttgaagaagtagacgaagaagaagagcaagaagaagaattagaagaagaagaagaagaagaagaggatcgctttttccctctaggccggtttcgaagagaatgttttctcttcaaggccataaccggagatcctccatcatgaagattcacattctccattttctttagcgactctctaaccacttccaccgggaaattaagtgttgcaagagatccttttgtggcgaaagccgcttgatcataagcaagagcggcttcctcggctttgtcaaatgtcccgagccaaaccctaattccattcctcgttgaatctcttatctccgctgcaaatttcccccacggccttttcctcactcctctgtatgatctttcttcatcaattccaaccttttcttcttcttcggagttagaaacgtcgccgttttgaatttcttccttaatcatcatctccggtgactcaaatgagaaaaagtcatcggagtaatcataattagggcaaaagaaggcttgaggttcagatgattgatccaagaaacagctctcgttccataagagtgattcttgtgatgagctccaagaacttggagatgaatacatggaagattgggaatattccataagtttttttttttttttttttttacgatttctctttttcttttctttttgttatctcttcttgttgtggcaataagtttatttcaaaacctaatcctatatatataagagacacggaatttataagatatatgaaagtgggaagtattttattgttatattgtttatcataggtcctattagacaaatatggctgccttaaaaaactaataaaattttaacacaaccgaatggggaccaaccacaaaactggtattttctttttcaatgtattttgggaaaaaaacaagattttatacggacctatcctccaattcaaagaaaaataaatgggtgatttttatttacacgtggcgtaaaactgtttagagggagtgacgttaggcggcgagaaaatgacaaaatagatgagatcattagtaccggtgatgtggcaaacaagtgccacgtaagctttgacagactcgattttaggacccgcttattgtccttcgaggcaatattgagtaacgatagtactgaaagtcttaaaagagttgactggaaaaagaaacatttcccaatacgtgaattaacgaatatactattaacaatagatactcataataataaaaataaaataaaataatgcatagattgagtatatttcgatctcatttgtggcaaatgtttttagagtgtgtatattaagaaacaccatcctccccgggcatcaaataccatcttccacgtcttccgatacaataaaaaaatgacaatcgttgttattttgaatttgttcgtttaagtctggtcttgtcagatttcttggatgacataccacaaaggcccaaccaaaggattcagttttcataagtacattaaccatatatattaaatccgatgactaaagagtagcagtcacatatctaaggttagcaagaaattgtggaataagaggataaacttttggttagatgtatgtaggcaaggatgttatgtactgatccattttacaaattatagaagatacaaggttaagtcaaaactattaggtcgcttgcatgtcatgtgttctcaaaactagggtagagtgtggagtcttataggcgggtattgaactgatcttgcataccaaaaaacctgaaaaaaaatccatgtggtacttagatgttaaggctaaatatttttttgtttattttttttttcatcgcgttgagattgtcttcatgttgggattgtcttacattaataacgaaacacagaaactaaaaataaagaatagtgtttaaacttaatagtacttctttttttcacaaatagtatcgttccacaaattgttttctcgcaaatagtgttgttttacattttcaatgctattttttaaattaaaactaattttctagtttacctttacctcaactatttttattgaatttaagttattaatcacttattaaatagagacaaacacttgtagttttaatattttcttaatttgtgtgaaattggtcaaaatgacactctttctcaaaatgatagatgagtaacacataacaacaataataaaagttttgcaacattgttttaaataattgatgttttaaacagacaagactggtgtatatgtgatatgtctatcacactatttcaccagattgttaattttacatcggcttcagcaacttattaattagttaagtataatgcccaacaaattagggtatacaacagcaattagttaatgcccaacaaatttgacaacaattaattagggtatacaatagcaatttataagttctataaagctagttactgatttgtaggtttacaaaatcttcccttgacatatacttcgttttgtttttagaattactaattcgtatcttttttttttcatagggaaagcttgaaaataaatttagaatagcaagatagaaaaattgtaaagttcgcagtaaccacatgattcattattgccaattatccaacggttgtacacgtaataccacattttttaatttttcgtcttaactgcaataactatttttacggttgaaatcattcttgttttttttctttctccaaagttgaaatcattaattttgagttttgtttgataaagaattttaagagaaaaagatagatcgaactgtggccccaagagagtggtcttttcttgatgtgccgacagccactaatattggcacaaagacaaaatagatatttctcagatccaaaacctaaacagaaaaatgaaaaccattggtcaaaattgttggtccatttatatatggttggagaatagggttctgtaataaagatcgattgaagcgtcacagttttagcttaactaaattgactttctttttctttgttcttaaaagaccgagaactgaaactggatgagacttcctcgatccaacatttatgattagaaactttgtccagattctagcacaaagcctgaaacctgtgtttactatagctaaataaaatatggctttaaaattgtttttttcctttctaaattgtgtatcagcaatctttgaaggagtaaccgatggccaaaaagccctatgctttttttttggattatgtttatttgttttgttttttggtggagatatgaaacatagtttgtgaaaaaataagtatagtggtttattataagttattgttcattcagaaatttggtcaagcttatttatatgagaggatgtttgtgtccataaagattaactgttagaaagtagatgaacatgtgaaactggagataacgatcaaaatcgcttgacgcattagaggagatgcctcttaaaaaccattcaatgttatgttcatataacaagaagctcaatagaaaatatgacatgcacataatatataaagcatatgctactagtaagtgtaatgtgttttatccacggctgtgcagaacttgggttctaaccttggttcgtcccttcttcgaacttgaaatcccttttcaaatttaaatagagataaaaacacattacacttactagcatatataagcacaattagttaggaagatgtaataagcctaaataccttctgtttacgaagtgtgtttgatgtatcatatattaatatagtgttgttatatgcgtaaaataagtttgttttttccgcttttagttagcgactaaggttttttctgatacattgatgcggaaggtgcgaggtagctcttcgcattacttcttatcatactaaattaactagtatttaatagttaaaatttatttttcctaattatttttgtaaatagttatcaattaaaattaaacaataacttaagaaaatgttgaaattataacttacatatagctcaaacacatgtacaacaacaagcaagttggccaaaatgttttatagtaattagtaattactgcaacgagttagtttaaatatatgatatcaacgtaatgaagctttttttttttttttttttaattttctggcgttttcaagcatctgataccacttgctgcttacaattgtctagaaaagtatttctttctcggcctctctctttttaattttgtaaaagaaaagtattacttgaggttttaatatgcgtcatacgacacgtctctttattgtttgttgtccacataaaactcttggaaaaataaatgagaaaaaaaaataaaccaaaaaaatctcatgtaacatttcgatattattctttaacaacaacaaaaaaacatttcgatattattttataactcatgaattaatgggtcgcacttgcttgttacaaagtcttgtcaactctatttgtaagtacactcaaaccaataatatcatgaaatgtttcataatttattttagggacgtccttaacatttctacatataatatactagtaacattttgacgattatcgtagataccttttttttttttactgattagagaaataaaacaagacatttcattttcttacaacattaaatagtacaattggattacgtttgtcactgatatacaatgcacataactttaagggaccggaactgaaatactaattaatacccacagaaaaaacaactagaagatataaaacgtatatttcaagggatgagtgggtcgacctgtagtagcttggctgcgacataaaactccatagaaaatataataatgtgctacataaatgctatttaaaaagttaatcgtgacgaaaaagtatcaattaaactataaaatgcgttggcatggctagtattaggatcaaattccttaagggatactcttctttacatcacgataatatttatcaatgttgaaacattaatttgtcaaaactaacaaaaaaaaaaaaaccttatttttttcagagcacttaagtcgagagattacactaatattatttaaaacgtaagatcgattttgataatctttttcttttaaatatcgtgaatttccattagtcctcatgtaataacaatggaaatagagtaaaagctcaaatatagatttcttttggatgccaaaaaatgatctatttttctactatgggcatttccagtttcggctatttcggaaattttgatcatgctcaaaataaaataaaaaaccatttttctgtcaagaaataaaagaaagaaaactcactatattccgtataatcaataacaatgttgaggcatgcaatattgtactatttccatgtgctataaatggaaaatatggctattgattattccccatcacaaaaaagtgggaaatagctaaaacattagagaaataaaattaaactattgatgatacagtgatactatatgctttttttttttggtaaggagtgatactatatgctttgaagagtgtttaaagcgggcggacaagagagcttgcccgcaaaacaaaaataaaatgtttttgtccactaaagtaattgatgtttgacctcaacgtccaagtgcataccccttccgaatatacataattttcatatattcaccacccatatttgtatcgatataccaatgatatataacgacaacaaaatttatcaacattatttcaaggggtcacctgtttttttttgggttataaatggttctattgtaattatcttacacatgatggaattctaaaggaaactttaaacacaaatagtttcttgggaaactttcataacatgtatatgaagtggagaagacaaatctaatcaacatattcccccaaatgagaactgagactacctagaattggagtgaaaaggaatcacttcaaagcatatcccctaaactagagtaacaacatattctgttttcgaatgtcacagaatattttctaaaaattactactttaaagcacatttagtctttagaaaggttttgtaaacagcttaagagtactatggaacttttaaagcaaggactatctttcggatcctaatcagcgaaatatgattatttttgacattttcaaatatatactataaaggtatacaaattaaaatggaatttgatattttagtctctaaatcaaattatctgatattacgatatgaaaactctggttaccctgttatcatacgggatcaaatctaattttgtattggatctcaaaatagaaatactttacctagcctaattgttaaaagatcgtctttaaaaattaattcaaaataacacgactttatcatggtattcttagacggtagatattttgatattatttgagtcgatcttttaaaatcttacaacataaactaacgtgagcatttgagttcgtggtccgtagagagaccataaatatggatatataatatttgactaaaagtattttcacagttggatataactaacttaaatttaaaatatggctataaacacttcttcttttttttttttttttttaatattatgtaaaattattcgaaaaaactgttttacgtcaagtgcggcttgtgtttaagcaaaatttgaaagcattaacaaatttaaaaaagtgagagatgtctatgttatcttgaaccaaaccaaacttaaatagtgatattcactcctttcggaataaaaccatacttaaagagtgactgaactgcaaccacaaagtctgtctttacaaggctataaacactttaaatacatcatgagttctcagtttcgtttttactgcaaacaatttatctttctttttttttttctcttctccttctagaatctctctagtcgtcgtttattgtgtctcaccacagaagcaaaacaaactctatattaaaagattgaataaaattgttttaaattggagcgagggttattgaattgtggaccattagaatgtaatttagtaagatgacttctatgacaacttgaaattaagataataccatataataaataataagagagacggtgcatgaatactctttttttttgttctaatgtcactttatagtgtccgaccctagccctgcttatagcgaaggccaaagacccgtaacttctttatcaattcttcttggccaatttttttttatattaaaagtacatcaaacatgcatgcgacttgatgtccccactaaattaaggataactatgagaaaacttagtagattcatttctgattagtgcacttaacagttagtaatattcaattcctggtggaatcaataataactgatcaacttgctaatggtaagaaaaatgtcttattttgaacggtacagtattacttttcatagattgataggttatataggttattgttaatatcttttggaaacagctagcatggtcccatatatgtttaataatttatatttattttcgtcctaaatatataaccactagatgattaatccagttagtctgaagattatgcttaagaatggtgtctgtcttaaaatctagaaattagaaatacgattgttaatattagtaaaacgtttagatgattcaaagttcaaacgatgtgagatacttagatatctaataggtttagtgatattttacatgtaatattgtttaattacaatatcttgcaaaacagaacagaaaaacattagtccttgatttggctccgtattttctaattgaagccatgtataatagagttaggattggaacacacagaaatgcattataatacaagttgtatatataatatataatttgaaatatttgtcacacaacatttaaattttcaactaaagatttggattttgatactatactgttcgtatgcaaaaacttgagagattattttctcataatagatattatctgatcagcttattagaatttgtcttttctaattttagctgatttttataaactttaaacagagatgcatttattgtaaacatggtttttttttattaatacaataatatatttatacacaaaaaaaaataaaaaaaattgaccatttcattggtacatgcatgcatcgatggtacaaataattcccaatttttttctttcttctggtttaacaattcccactttcaaatagaagtagacatactaaattattaatagattaaacaatcgcgaaacatgcaatattatagtagactaaatattgacgtttaaatgatgagtacgtttctaatctttcacgaatttcaacttaagagaaagcaatccccacgaggccttattcgaatagcttttattttatcatcacttgaccttaatataattagttattgaataattcgaaactcaagtactatataattaatgtacgaccatctagatggtaaactcttctaattgttagactggccggtgaggcggtgacagccttcattagttaggccagtagaattcaattcaactaggcggtttgaatatatgacctacatgtaattcttcttctcttttataacttaggttgagaaatgagaatacaattaaaaatactaatatcacgtttctaaatcatatgtcaagttatccaagtgtggtaaagcaaatggatcaaagttgtaggatccaaaatctggtttgtctcaacttttttggtcaaaattaaaagttttgtaattaagctttcgtagctcaatcaattggaggagtgttgttacaatgctgccagattcagcttcaaatttaaccaaacaagaagacacgtgaaaaatctataatcctaaaatatgtactggtcaaattaagattcaaaattacgtgaactccttaaaacattgttgaccgtttattgttataaaactagttcaaaacaaattcgaactacaatatcttatgatctatccaagtacaatatcaatacatactcttaaatgtgtcagtacaagtttgggttggaacccatagattgaccatgctcttgtgatcacttcacgtgtgcttgacgatttaaccttgtgtgttcactaatttacgaaaatgtggtattcgtttcatggatgcacatatacagtatatattacaagctgtattttttataaaaaaaaactcaattaataaaatatcacaagactcagatatataacagagagtgttgcattttttaccactctaacttaataagttaatatgatacatgtttaaaaaaaaagaagttaatatgatacattatatacttccattgaatttttacataatggcaaaacaatagtattttttttactcaatgtaatacattattactttaatacaataagtttttttagaaaaatcaaattttcttagttggtcttggaaagatccagaaacttctttataattcaaggcgtttacccgttgaaactaaagtaagagaaagtgatcatcaaagtgcatgcatcttcaattaaagcacgtgtgtatcaagtttgttatgactaagtcatcactcatcggacacatgagcaaatggagaatctttgtttgtttttatctttaaaaattctccaaatgcatatattaaactgtaaagtattcataaatatataccaataaaatatatacaaatgtaaatgatacatgcataagagaggcggcggcgagagtgttccgtaagcaactgtatccgaatcatacataagttcgttgtttctattattaacgccggcggccgtatcccgtatattcaattttaaaaattaaaaagataaaagttcgttaaaccaagaaacgtgtgataaatggtctgtttatttagaacaaattttgtcttgtgaatttagactgggaagagtaccacaccatttagtcatttacaaaaagttgctaggatcactcttagtctttagtaaatagcaaaaatacctcacttgcttcatggagtaatatgtttcatgaatctcgattcaaaatctacctcaatgatcaaaaaagaaagaaatatatccttatgttggggtttttggataagtagtgatgaatttttttaaaacaatttgcaactaggtcatatgattaggcacttcagttaaaggcttaaagctaaagcacggaggagctagggtcaacaaagttatacctcgaaaatataggcttctctgatttggccaaatatgcctcaattagttgacttgacttgactctcttatttggttcagaattggtttactagtttggaccggtaggaatgtgaattacgacaaaacttgagatagctccgttaagcttacaaaatatcacacacttttttggacttagacccatttagtgcatcaagcattggtgttggacttggacccaagaccaaaatgaaagacagtaaatcatttctacatgcaaaatacccgccaaataatttttacactttttttggtagcccaaataatttctgaatcgaaatccaaactaatcatcaaaatctatagataatggaataataaccttgcaatttaaagcgtttacacccaaacaaagaagatccaataatgaagtccaattattataaatggtagggtatgtttgaaaatatcatgtagacttgtataaaaatcaaccagccatccatcaatcaaaaacaacacctaaaacatcaatctttgtgaagaagtggagtgaaatctaaaagaattctaatttaatgatcgaagtagctaaacaaattatttcgagaataacttcataattcagtggcaaaacaagagtttagtatacgacgatcatttgaaaagaaaaaacattaaatctcactattcttttcattgttctttggggctgagacttcacaaagctcactaagatgaatggcttggcttgggcaaaggtaaagccttattcagaagcttattcgttgatacacctcctcgagccttcaatcgcaaatcctcaagaagtcttttcgcttctttcatttcgtctttcgcgctatctccatgattatcccaagcattgattactcgctgttgaaattccactgcgaggctataactgcaagcaggcaaaatggtcagggcattaaacactttctatgaaaaatgcagtcacatcaaagagtgagattgtgttaacggaaatttacttactttcccattccagcgtaagctttagaaagattctggcaagcatcgatggaatccacatggtttggaccaagtgaaacatccataatgtctttagcaactgcaaacatttgagcagcggattgaggtcttccgagttctaaataagcagcaccgagattgttatatacatatccaactccaaaatgtttagcaccaaagctttcttttaacctctcggctgcactttccaagtaaggaaccgcttgtgagactcggcctgagaatagaagcaaccaacctatcctagcagaaacacttccttctgagtgctgttcttgaggaagcttctctagtatacctaaagttttctgcaataaagagatggcggtttcaaattcgttcattgactcgtactgcattgctacctcagagtatgcttcagcgacttcaactggcaaagctgtttcttttttctcgaggatttcacaagcaaactccaaacatctctttgattcagcaaacttctgttggtttaccaaagctttcgacattgatataaacaccatagctctcatctcactgtccttgtcagtttgttgaacaacgctcttcaatatatcaatcgcttcctcgtatttacccaaagcaaccttcatgttagcagcatcaatctccgcacgaatcagctccaacttcatcccccaattctttaacactctctgagacaatcggttctgctccaacgccttgtcatgttgctccaaaccactataaatcacaccgagtagcctccgatcctgcgcaacctcagctgaattattccccaactccttcttatgaatctccaacgccttcaacgcataaggcaaagcctcattaaaattcaaaaccgcaacataagcatcagcaagactccgattcgcaacacccatctctttactatcttcatcaaaagtcatctcctttatctccaaactcttcttcaaattctcaatagcttcctctctccttcccatagcattcttaacattagcaagctcaagctgcacagcgtgtaaaacaggcctaacgtcttccacaacacaatcaccatccgcctctaacttcacaagaatcctattagctctattcaagtaacctaaactatcactaaaacgtttcaaaccgtaattagcagaacccattaattgcgacgccatagcaacgagaagattaggtttattaccatctccatcgaatgatttaagagctttatcagcgtaagacagaaccttttcaggatcttcaccttcacgatcgagatggagccctaatttcaaagcagataaacctaattcgttcccttcgaatgataactccatctccttgaacaaacgtaccatttcatcagtggtgttcgctgactcgaacgcttcttcgagatcgattttttctttatcagatgacgaaatctccggaggttcctcgacatgggtattcaaattccgatatggattgacccagaactgacgcttgatcagatcattggttcttctgcagctagtggagatttcgcgtgctggcgagatcagagaagaggacgaagacgatgaagaagcagcattaaggtggattgaaagtgggattggtctgattttgtggaaatgaagccgacggattagagaaatcgataaacttttcattgccggagctcgcgtcgagaaaatcctctcgctaacaaaaatgaaaaaccctaaaagaaaacaaaaccccaaaagaagaaattcgtttttttttttttttttccaacgtttcattaaaaattaaaaaacaagaccataatgtcaaaacagagcaaaaactcaaaagaacagagcaaaacatttctactttttgtctttcttttctctaatcttctcctcgagtaactctccgtcgagttcataaattctgttcacagcctgcatattctctagcgtctcccgcagcttgctgctaccagtcccatcgtatctcaaatgtttcattgggtaatccaggatattgttcactataattctggtttgtttctctactgcttccctcgtctttttgtccatgccattcccatgtttcgagattaatttttcaacacattcagctctgattctctctgttttgcttcttaatttcctgattgttggaaacgtctgcagcgaatccctccacccttcaaactctattgtctcctctcttattatagggagagcttccattgatttcctcgccctgtcttctttattggcagcaacaacttccttgaggtcatcaacgttgtaaacccgtgcactgtctaattcagcaacacaagacccaacatttctaggaacagagatatcaacaaagagcctcgcataatctgcaggacaaggagggaggatctctacgtgctccttcaagaacaatggtgtctcagatgatgtgctagtaaaaatcacgttggcttctgcagcacaagctagaatctcgtcaaggggtttataaataatctcaacgccagactgcatctccttgcggatagctgcaactttatcttcgctccggttcataaccaccattttagtgcaacctttagcaaccaggtgctcgattatacgcttccccatctctcctgcaccaattaccaacatcatagcagatgatacagatcctggaagcttagtgagagcaagttcgactgcagcagagctaacggaaacagccccagacgcgatattcgtctgtgctctgacacgctttccagccttgtttgccttttcaaatagagtactgataatcctcccaaacccttcttgtttaactacttgttcagcttttctaacctgtgattgtatctgattttctcctatgacaagagattccagaccagctgagacttgaaacagatgttgcgtggcgtctttgttgtacaacagaaaccgatgctgacagatatccgaaactggaatcccacttctctggcaaagaaatagcattttatcatgtaatcatttgccaccgattgtaacactgaagtgaatgagataaaagggaaagggaagaaaaccttagacatccattcagtgacttctttgacaccacggtaacgagaaagagcggatacataaatctcgatacggttgcaggtactgagaacagcagcttcttcgatgtgattcaaagcgcacaactgagtgatagctagtggccattcagcttcaggaatagcaagcctctcacgcatctctagaggagatgtgtgaaagctaagcccaatcaccacaatgctgcttctctcccttgtgtatcctaatattcaacaaagctataaactttaacaaggtaacaacaatctccgaggatttgctttaacgttaatcaacgaaacctaatcacgaatctcaaatgcaatcaaaaacaaaattcaaaagttggaacatttcagaaatgaaggcagagattcttattactgtcaattgcaggagaattcttaagcttgtccagaggcgatgagtcgctggacggagaagtctcgcaacgcactctctgtatcaaacctctccttgtcatcttattcatcggaagagtatgaatcctaatcaggtctagagaagaagacggattatggtgataccatgacgacgatgtctccagattcgggctaagaacaacagaggcattagaaaccgccatagctttttgagtttactagcaatctcgagacagagacaaagaaagagggatcgggtgaagagggattttaagaaaatgtaataggcattctcaggtttattttgaaatgtaaaaagcaaaaaaaaaaaaaaagtaagaagaaatatttgcatcttggtcctttatcgttttagtagaaaatatttgcatcttggtcctttctcgtttcagtctcgaaacaggattcctacttcaccgaaggatcaccttaacgtggtgttcttggcgtggaatgcaagtcaagcaattcggtgtggtcaaacactgagctcttaatcttgagattatccgttatatcaggaaaagatcatctcaaagaggctttcgattccgcagagaccactgatgaagtgttccgtttgttcaaggagatggaattgtctttcgaagataacgagctaggtttatctgctctgtatcaggtgaggtgaggatcctgaaaaaggttctttcttacgccgataaagctcttaaacacgattgaaaaacaccatttttaaggacctattttatatacacaacaataaagaattgcatgtattgttaggatgaaacataaccaaagaaaaaaaaaaaaagaggagagacttgttattattcccacatttttttttccaaatacagagaacactttctacaaaagcatctcttttatcttccttcttcatccaccataaaaaagactgaacaaagaaacaactttgaatcaaaaaaattcattgttgtcaccgtaatgtggtgcttgatgttgaagtttcttgaggtcttgaactatatacatcgtcgaaatggagatcaatcccagcttcgatatcgttatcgtccatgaatgtagttctcgacaaatttcttcttgcattctcttcccaatccaattcttcttcttcttcatcttcttcttctatgcttcttctgctccaagagttgtctaataagtttcctgctgtgtagcggtttataaaatcaggtggctcgatgaagctattggtggttgcgggatgagctgtgctgatctgagagtggttgcctcttccccaccactggttcctaccatcaagaggatgctgactcccataactatcctctccctcgggttggtcatggcgcagaatgctctctctgaaaaactgacctgatgtgcttgcctccatgttgagcagatctctgctatcttcaccacggattcccaaatcaggaggccaacaatctgtagcgttctgatttgcggttaagatttcatttgctctctctattgggtgatcagttctgttgtgagcctgagaagtgtaataccagtcaagaagataaggatgattcctctgatctggatcaatcagccacattgaatcagtgtgattgccgctcgcaagcggatttcttggaatgtctctgtataaagcaggggtattagtgctttctcgccacgccctactaggagatgagtgtcttgtgtttatttcatgaagctttcggtcccggaaagttctgagatttgacagaaactgcttcccaagagaatctgactcccaagaaggataactactctggaaactgcaaataaaatgtaacacttaacactgatttgcatatattccaagagaattcatatgttgcagagaaaaaaacagacaatgaaatgcctcaaacctcaagaatgatttctccattttcccttgtgagcttctctgctcacgacgagttgcattatgtggtgaaccatatttgatatttccatggttctcaaagtagaaagcactaaagctgcaagcgaaacggccaatgatcataatgtaatccttattgtaaatttctttaaaacaatttctggacaggatatgactagaagagttgtttacctgcaaacatggcctacaccttcaatatcaactgtgaaatccttaatgaattgcaagatgtcatccacccgctggaaagtgaactcaaaatgtgtgagaccacaatcattgtatattctcaattttgacgtggggtacactaacgcgaatgtgagagaaatatacctttggcacgacaaacatcagcaaaaatggtgtgatgaagattgaagctatctcctccaatagcatcattccagtatactgaggtgcagaaattttcattagcatcatttatataaattcattcagaaagtagtagagaccaagaaggaatatcataaaaagaacccaaaaagttagcagaacatcctattgtaccctgtaagtagctcatcttgctgcttaaattcattacattatgaagctaattaagtaaaaataggtgtaagcataaatttggcattcactattcagcgtattatggaaaataagactgtatgcagttatcttgacagtgtcaaatagaaaacattcagaaaatttacatgaaagatggcagtgactaaatattgatctttagcttaaacaaactgtttgtaaaaaaagaagttaataagttaacatggtacctgaaacagagtctctaactccaagcggacatcatccttgttctcctttccacgccatctcttaggcatataatgagtgttttggaccaccaaagacatagttcctactgggtcgaggaccaaaagttcatccgatatggcagctctactaatagctgtaattgttccaaaaacagcggcataccagaacagattgcggccgaatatctacacaggtggtaaaagaaacttcaatacccaaataatttatctatcaaatgctttttgcgttgttagtatttcttacatgtccctcaagtagagattcttcaagaaacgcaatgatgattaagacagcagcaaagccgccagaaacaaacgagacaaactttgcaataatggagatgataggcgagggaaattgctttagatattcggatgcatgtactacactgctattaatccgatgcttgaataaatggtcaacctgttgtagaaacaagaagtttagaaaaggcatcacatttattttgaatggagagagtcggaaaatttcaaaggtttactaagaaatcagaattaaactccgttcacacgacttttgtgggcatggacgccagatgaaggcaactacctcattgaattccctgaagagccactttgacaaattggaccatcttcgagaagatgcagtacttggatgattgtagaactgttcagcatgccttaggaataaatacaccaacataaagatgacaagaaacggtgacagcagaagcatagcaagcccaaccacaaatagtcgtttcttcagtgttgtaggatttgaaacaaagtcccttctaacacgaaaattgctgcagaatgaaaacgcctgaattagacaaaacggacaattcttagcatgtgcaaggaatttttcattctatggccttactcttcaccgtagtactagtagttaactacgaatatgaaatataacatacacgcacttcggccactcccatgtaggttctaacaggacaatcttattaacttacgcaatttttcactgacgtaatatatatacagggagaaaacctctaacaggacaatcttattaacttgaaaagatcactacaatctgaccaagaaaaagcaaatcatcaaaactgaaacttccatatgcatcacaaactctccatttatcactatagcagttcataaaatcctatatctacaatgttattagaaagcagttttcagattagatcaaagattagcgtggagaatagcataccagtcaaacatgctctgcaatatgcaccagttaagggtccactcaagggtctttgtcaatacaaggtgatactgtgtcccatctggtgcggatttgactgctggaccagcaccagggatccaatgggaaattgggaaagaaagcaaacctttgttgagcattccaatcaagtagttttctttccgcataaggcgcataaccatatcatgagcagaaagatccttaaccacacaaaggcattgtgagctttgtaactgaacaaccttctcaaggactgttgcccatggcatagtaaggatttcattgtctgtgacatggagactgcaaatttacaacaaaaagaaagaaaatcaattatgacctaaaatgcatgttttgctctagcaataactattcatagcatgttgcaacttccaacttacttgttgtaataaaagtgccgaaagtccaaagtatctttcaactgggcaaaaaaccttaagaagcagaagagccagtacacagagaagagggccaaatatccaacaattatagcagttgtgagcgtgaaaggggataaaggatgcggatggatagcttctttgacaagatcacatggtttagttcctgattcaactgcatccattccacattttgcattctgaagaccattccaatcaacatacagcaagaaaaacccagagaagcatatgatgaagcccagacttagaagctcaacagcccactttactataatacaccaaagtcctttgtctctgtagtagctgtagagcctttcgacaaaaagatccaaatcagcaattggttgaacatttaaactctctccattaagaagtcccgatgggctctcactaccaggacttggtattcctccgtagttagatagctcaatctcgtgtgactcattatgaagcaatccagtagtcaaagacgatgatgattcaccacgttgccatttaaaaaagttacgtacatttggacccttatgcccactgctcatcatttgtaaacacagacgattggccaaaacagccggtccattccctgcttaccacgcggaaatttgaagaaagtgtagtgcgcaatgagaatgcaactacaaatcctgcatcaaacatgaataacataaagcatccacaatgcaaatcacctaatgacagagataatttatgtatgcaaacaaaaaagtgccactaaaatgttcaagctagaagcacatacaatgaatatactaaccaatgagacactaaggcaaatcaaatccttaaacgcagaaagacaaaccaaggatacggaactcgtggcataacctgctaaagaaatgtttctatatctgttttccaccatgatggatataaaccagacccacctatcctttgcttgacactcaaaagactattcgatttcaaacacttcctttctttttcaacaatagcattcatgcacaagcagaatctttggacaatgcactaaatgcctagcactctgatgacaattgatggtgcagagaaagcgaagacgaagtaatctatactcaatcaagaggctgacacaagattcacgcaacctttgcacaaccaatagaccttgatcaaagtcaattacctaaaaccaactctatttttcacaagaagacgaagcaaaaacggcgaattccttcccaatagaacaaggggtttatctacttttaacagggaaatgatcaggagcaatacgattctaaattgaaacctcaaaaacccttaagctaacactataatctcctccaaccttaaatcacagtgcgattaatcaaaaaaaatcaacctttctcgataacagcagatgagaaaatcaaaacttaccagagacccacgaaaggaacagcaattagaaagcgaaggtctataagcagctaggaagatataattgtcttaatatccgaagctttagagaaggaggaatcaaatacagaggctatgggcaatggaaaattcgatgaagaagttgaaaagacaagaatttgatcgacgaatttaggggagaaaagcaaaagaagaagacgaagagaattgggtttgcgtggaagaaaagaggagtgataaaatattgatgctttggagtttggagtactagttttcaattttcgatttgggcttttcttcttcctcttctcttctcttctcttctatacaacattacttaaccaaagaaacgtgatcacgagttctcttcctcttctatgattttggttttactttgatctttggttaaaaaggtaatctaacatttattagcttgaatccaaaaaagtctttgcacacacaaaaaaaaaagtcttgaagccaaaaaattgtaatttttctttaatgtgatatattgaattttattttaacaacttgtataatgggccgattgttttgagtgggcaccggcccagattctaaacagacccaaaaaaacaatagttaagatgtacattatattactaactttaaaattgagttttgaaaatatgatagtgagtcagttgacataaattttggatctagatcagattcttggtatcaagatcaatatttagtctcagagcataatataatacaaattgatacatctagctcctttaattttttaaatgttaatcaaaaataaaaactcatgaaagttataattattttataacggcattatatttttttttgtcaactagacgataaaccgataaaagaaataaaaattggtatttattattataatcatcaaaacttcatatattgacataaaacaacaaatttaaataagagtatatagagaaataataatatcggaaagtataacatttaataaaaagaaaagttgaagttttgttagtaagaaaatagtagtaatgacaattgaaaagaatctcataatcattgaaaatttattgaattctttgatttagaatagggatgtggtaatattcaatgtttaatatttatgtgttttcttttaataatcaatatttatttcatgattttatatagatttcctcattagcaaatataatataaaataaaatggaaacgacgaaccttaataagaaaaagttcaagtatatacagaaataacaataccggaaaaatataacatttaatagacaaataaaattaaagttttgttagtaaaatattagaaatgacaatagaaaaaatatcataatcatttaaaaactgtttaattctatgatttaaaataaggatgtggtaaatatattcaaagtttagaaagagaaacatagaaaacataaactaaaccattgattatatttgatttgctgggctaactgttttatcttaatattttactgttgataagattccttatgatgagattatctttgatttttcaaaaaaactataaatactgaacaagcagcataaacattgcacgacgaccttatataaatcatgttcatataaaaaaaatcacaagttgaaaaaaagaaatctggtctctttggtttgcatctattagattcgttcagagacagcaattcataatgggcctaattaatgggcttcttcgtagataagtgttttcgcgggaagcaacgggttaataggcgcgggaggtatacgtggctttggtacacgtaggattgcgcgccaaagacctaaataaatctaaacccttcttcttcttccgtcgtcttcatcgtcttcatctatctcctccactatctcctctctgcatctgacactctatagacattgttgataaaaatgagtacaccaggctcttctagatccattccattcaaatcgaagaaacgattggtgatggattcgccgtcttcgaaatctcaaaccgggaatccaaatccgtcttctgtagcattgcctacgccggaaaaaccacttgagaacatgcttagtagatcgagaaaccgatctgtggctttatcagtgaaagaaattcgtcaagccgctggatctcgtcgcagatctgaagatccggttgcttcatctgccaaaagcaggctctttttcgattcatcatcatcttctccttcaaaacgtaaaagctctaacaaaaatgcagagaaagagaaacttccggagaagtaagttttaatctctagggtttataaaaagtttcaattttttcccctttttaactgattaggatttggatttgtgcaggtacgagaatctgggaaagttctttgaagcattggataattcgatgttgttatcgaaattaagaggttctaagccaacattctccaacatttctaaacaaatcgagcatttaaccgagaggtagtcttcctgacatttcaatttgaatcgtgtttgtgattgtcactgattggatctgatctgaataaataagccaaatttggttattgcctttaaactttatagagtcgataagacaaattaataatctagatcgtgtttatgggatctgatctgaataaataaaccattttgatctttgctttttatactttataggttcgatgagacaaaagaatactttagatctgggttttatagatttctccgataacttttctagattttagatattcacgagtctgtttctggtgtgtttatataattcttgtgtggatgtatatttcaggaggttttgttatagtcacttggctcaaataaagcatatattgcctgaagcgattgagattaagagagtattgatacatgatgaaactacttgctgtatgaaaccggaccttcatgttacgctcaatgccgatgctgttgaatacaacgacaagtcgaaatcggaaagtaagaaaatcgctcttcggaaagtgtttcgggctagacttgcggattttgttaaagctcaccctcaggtataatgccctatctattttagtgattttggaagttgcattgtgattttattcaagtactaatggtgttattctctgttttagggtgatgaagttccagaggaaccgcttcctgagcccttcaatagaaggaaaccagttgaaaactcaaatgttgaagtcaagcgtgttagttctctcatggaagagatggcttctattccagcatctaaattgttttcatctcccatcacatcaacgccagtcaaaacaacttcaagtctggctaaaccaacttcgtctcagattaacattgctccaactccaaccaaaccaacttcaactcctgctaaacagactttgtctgagattaatatattgccaactccagtcaaaccagtgtcaactctggctaagtttccttcaacaccggcgattattgactcaacaccagtcattactgcaactccacctgaatttgcttcaactcctgcccggctgatgagtacttctctggcagctcgtccgctgaaaagaagcaacggtcatacaaatccagatgatatttctgctgacccaccgactaagctcgtgaggcgttccttgtctctgaactttgattcttatcctgaggatgagagaactatggatttcacagatgatatacccattgatcaagtaccagaagaagatgtatccagcgatgatgaaatactcagcatacttcctgataaacttcgacatgcggtaatacatctctattagtgattccttttcttctcgtaattttgctttatacttttcagtttgagattaagaagtacaaactgagattggctttacttactgagattgtttttttgctcatttcagataaaagaacaagagaggaaagcgattgaggatcaaaatccagcaatctctctggcaaaaagaaggcgaaagatgatcgcttgtctacctaaacttttcaatgtcatccattacttaattcaatcgataaggcgttgggttatcacaaaagaagagcttgtgcacaagatcattgccggtcactctgatattactgacagaagtaagccctctaaccactaagtatctcattattacttttctttacattgtttgaaaaccatcctaactgttcttgcctcacttacatttttcagaggaagttgaagaacaactaatcttactgcaagaaattgtccctgaatggatgtctgagaaaaaatcatcaagtggagatgttctagtatggtgagtctaatatctcacatatactcaactcactttttcttggttttatggatcgctcatgtaagcaactttaatatgcagcataaacaagttggcatctcctctaacaatccgatcacgtcttgaagaagaaaacaagcaagagatggctccactgctttcttgagatcgtggttccatcggctgcggttactttgggttctaacttatttttggactgccaaatatgttatagtctattcatgagacagatgtgtagagactactaagttataaagttcctaagtaaagtaaaagggtgaaaacaagtagatgacaaactatttaggaaggtgttttcatctttttctgaattatgacaatgaggttatttctctatcaataaagagtaattttatgcattttgtaacagaattctttatagaacaagactataaggaccgttgttgtgtgaagtatggaaagagatcagatttaatctcccaaccatgacatatctaaatccttgatgacaattctctttctgattatgtccctttatatttgattaaatccgttagacattttcatatatgttaggcaaataaccagttcctttggatctaagtttaatttctcaagccactttaatactcctcttagttcctctaccgaagttccaaagggtcattggccatttgggacttcggttccgtgaattagaagaaaatttctggtatattgtgaacccaatgttcaataatattcaatttcacagcttaaaaatatattggtttatttgcacaagagaaaaagacagaatgaaaaaagagagagaggtgtgtttctgagagcatcatttgggcctactgggctttcacaaagaaaatcgcgcgaagtattaacggacggaattcggcgggagtccacgtggcaccatcacaagtcggattcgcgccaaataacctaaaataaatactaaacccttcatcatcatcatcgtcgtgtccgatctcgctcctccactctctcataaatactgagtctttttatcattaatagatacatttttgtatcagaaaagcttaatagaacattgctaacatatttcaatcctagaaatgatacttctctttctaattatgttatgtaattgaaggaacctttgctgcattctccttaatccgttgagactatttcctaaattcctaagtgataatattaggactgtcaataatttttgtttcaatagatttgtatattgacgactaatgattattgagtttctagattagcaattaattcaagctatattgtcactattaacaactataggccggtcatctttattgactctctagtcatcttgtcacaacttacaaagcttcttcattttactttatccatatgccatcaatacacacgatttacatctctactatataataacctatggtaaatgaaataagtgaaactaaaaacaaaaacaacagattaaaaagagagccatctaaataatgcatcaagaaataaaactggaggatatcactttggtagtgaggtaggttatgatttttcatggccattccaatgagccaaaaagaatacatcagaagaagaagaaaaaatggaattttgtattgagtgagatttctcttttttttttgttttctttataaggacaataattattagattccttagatcttgtatggaccacaagtagtcccatcatacattcctaagtctcattgttttcctttgaaaaagcctttcccaaacagtaatatactgtactatataacaaaagtattttattaaagaagaaaaaatagagagataagttataaattaaaatctccaaaaaagaaaaataaaaaaaagagagacctttgccactcttttaagcaatttctgacccaattccctttttggagaaaccttcaaaaccctacctttggaatctattttttaagattcgtttattttctttctggtaaaaagaatatggatatctcaccttcattttatttctctttgctattttagaaaaattaaattatattatctttgcagaaatttaagtttttcttcttcttctgtaaactatgtgatatacatataattcttaaacatatgctttggtattcagtattttacaaaaccaatagttaatttactataaaaaaaatttgagagtttagtagaaaaaaattcgtttaactttacttttttatgaaaatctaaaatagatattctgttataattgtaactaataataataagttcaaaatgctacaaaaatgtttttgaaagggttccaaaaccatgcatgtccatatggtaaaatatatgtcatacatagctagtcatgtgagttcgaaattacgaaacatttattattgtcaataactttattatattgactcaaataagccaatgcagaggaaattaagaagtcttgtgaagtatgtttttttttataaatagtatattgaacataattgttggggaaaaaaaaaacagaataacaaatcacttcaaaccaaatgtatttttaattcataactaaaaaataattaaaagaattatttgcatggcttatcagttacggaccaagtcattatagttcaaacgttgtccactaaaacatattatcaaaagctctttcatttgaaagacattgaaacaatttgatacaggcatgctttgttctaattaatgccaactttcggaaacatatagaaatctattagtataattatcggtggaatagaaatttatgaataatcgacaaaagtgcaactgtctccctttttttaaatgtgacttttaaagatagctcagtaattgttaaatgtcaaaatataaacatattaaaaacaaagaacttgcaaaatttaggatgatattggcttaaaggaaataatcattaacagaaggtaacgacttcatgaaaacatctttagttatctcaaatctcaatgacttacttcaaaggcgacgatgtcatgaatatttatttaaccaaaaattctccatgtatatgtaagctaatggtacaatttatgttcagctttctctattcgtgtgtaatcttaaaacattgttttgaataattttataatatttagagttttaaattgaaaatttctgaaataaagtaggaaaaaagaatgattaaaaatgaaggataatatatttatatggattattaattgaattacagctaaacaagttaacagataaaaatgatgaaaaggggaaaatagatgttgagttggtgcgttgcattagaacacattgatggaaacaagtcatgagagcatataataagagcctccagatagaatattatgagctatcaattgtaaaacatcatcattttttaatttctaagtggaacccaaatctgatatacatatttcaaaatactctcaacccttggggttttgatgaacttaccaaatggtcgacagaaaacacttgtgaattgttgagataaatgtatttacaaagatcatctttgtaaatgtcaacatcttaaaaaaaaacttggactaggaattgttttaggccgtcaattcgagcctaacaattgttgtttttgttcttgtttttgcaaagtaattttacacttgaaaaatatcgttacaaactattcacaaatagtttaaaattagagatgttacaatctagattttagttagttttaaaatttaaaaagttacgatttaaaatattttgtatctatctaaaacatgttaccgagtggtataatgtggtttgatgcgatttcaattttggttataatttaactacctatctttatgtttctaaaaaagtgttggtttggtattttacttctttggtttggatcagattctgtctcggtttattaaatgacaaaaatagagaaaatagtcaaattaaggttttgtttgcttgtagaatcagttgttttcggttcagagattgagccggtttggtttatttggattgaacatcctactctaagaattggatgtttttgctgtttaacttgcgtctaaattttacacacatgagttatcaatatttcaatttaaaggtgactataagttttgacaaatattagtgattattagcttatgtgattttggttatataacggacccgcaaccaaaaataacataggccagcacataaattattcgagggtatttgctttgtccaaggatgattatggtaaacaagacaaaatgagtgagtatgaaaaagacattggatttttgttgacaatacaaaaagggaaataaaagaagcgatgtagttaatcattttgtgagaatatgtatggacaagttataaagttccaatatgtttcaactttatattggcaaatgaaatcatttttttttctaaagctgaaaatcctcaaattcattgcgagaaaatagaataacaaattgtagttataaataattactagattttaatccgcggtataccgcgggacgatttatttttaaaagtaatatatattaaaacttgcaaattttatttttacaaaatatttatattttacagtttataattgttattaagtaacggtataccacgaattcatgagacaattgttaaaaaaactgaagttttgacccctattaaaacaacatattaataatattttaaaattttataaatattgattcaaatacatccaccatataacccaattccaaaataaaacacgttctgtaatttttttatccgtcccatgatttttttcaaagtagtaatttttaaaattttagaattattttttatatataaaagttttgcaaattgtatcattctctaatacatttatattttatagtttaattttatatatagtaacattatacataccatataacatttttggttttatataattttttctaaattaggatgatttgatatgtttaatattagtggtcttaaaaaataataaattaaagatttaacccatattgaaacagtggattaattatattttacttttttattaatgttgattcaaaaacccgtccctccaaatccgtcttgccaaaaagtcatttattttattaatattaattttattaatgatatgactctgaattataatctaaatattttagctaataacataggagtgcaccatatttatttaatagggaaatgtaccatatgacccgaatgcatttttatccaaatccaccaaaaaagtcttgcaaaaatactataaagataagaagcgatagtcggttttgatagatataagattagcaaatatattagttagcttaaattagttaaagaatacaaattaaaagggtatgcaccatatttatttaatagggaaatgtaccatatgacccgaatgcatttttatccaaatccaccaaaaaagtcttgcaaaaatactatagagataagaaacgatagtcggttttaatagatataagattagcaaatatattagttagcttaaattagttaaagaatacaaattaaaaaggtatattacactttattcaaatattgtatcaaaacttatataacacagagatttgataatttttaattgttgaatacttcttttttgtgctaattttatgtgattaagatttaattgatttcatatataaaatattaaattgacttatttgtttataatttggtaacagatagatatttgaatattcagtatattttgcttcagtttaggaaatctttgatgacccgtctttagatccaataagtcctataatctagagattaatttgcagtataccgcaggtaggcttatattttagttaaactaaaaacttttattgtaaagatgatttaaaaatatatgatattattttatttgattttaaatgtatagtaaactgtgagttgtatatgttttgttgatattatctatattgtttagtgtttaagattatacacttgtagtttgattgttaatttaagagtttcacatgtagtataccatcttgtattaatatcgatctaaacccgtcaattctaggatttttcagcttatattaaaaattgaatcacatctaatatgttattaactattgtaatatataagattataaattttcaatataatatgtatgaaattgaatatgaatatttcaaatttatgtccccttactcagtagaaagttttcttaaatctatttttcacccgttataatattatttcatgtattgaacagtttatatttgtttttaaaaattcaaattatggcatatgcgaaaaaactctaattatttttttataatgatgatattatttttccgtataaatagaatcatataaagatgagaagtgaactataataattaataaaaaattaatatgataatttagataccaaatatagtttgttgattttaattggttacttttttagaaattaataatctatttcgtttttctaattaaattaaattaattaaatttagatatcaaatcttatatgttgattttgattggctattatttttggaaattaatattgtatttcgttttttaattaatttaattaattaaattagtatttgactttttaatccttaaagagataaattaatttactttttaaaattttatttctaatggcatacctatgtaattacttacaaaaattaaggttatatttaaaatgtacttcccaaataatatagtaggattgtcactacgactacgagggacacttgctaaattttcggaatattttatcttatgaattagaaggaaaattattatggaagttgtaataaaacatgtacaacattttaaatatcataggttttttattacaaaagtattatattttaatagtatatgggaaaaacaattgtctcttcaaaatttattcaaaataaaaaaaaaattaaactatagacgaatgagcctcgaaaacgcaattcctcaaacatttttttttacaatcttatccaccaacgtatgagtcaaatcaaacaaatagacaccttaaagtaaagtatatacatagttcactaatatttttgctagacggttaacctctttatacatatacgagattcgaattatctactctgtagataaaatatatgatacaaacttatcaagaaagacaattgggttcgactcacaaactcttgcctttaagaatcctaccactaattccgcagctctagcctcatcactctcttctcccatgggatatacaattcatagtagacttcctacaacttcggtaaacgagccgagtatacaatgtttagcgcacaatttccgcgggaaatacaaaaaagattgtgatgttaatgtgatgaatttgtaattaaacacacgataaattagtgcaatgtgtaaaatattttataaatttgtgagtaatgggtaaaaaaaaaagtaaagaaggaagcaaagttcagttggtgaatcattttgctggccattactctataagagagagagatcctatctccataaaatcccataccctcaaacacacacacactcaccatcccactaactcgaatagttaacatgcgcacaccgatccttggcctttcgttgctaaaatgagcatggtgcgtgattcacccgcttacttgctcgatttctccttcacccttttaaaaaggaacgtcttttagcttacctctgcctcctttaccctctctctctctctatctctatctctgttctttcctttttccggcgaatttctgggctgagattgttagtgtctctgagtgatgcagagatcaactgttgtagttaatcaatatcttctgacataagctaaactcgattctttcttacaatctctctgtctctctctgcttccttttctactgtcttctttcttcttctctagcttttgaattttcaatattgatttctcccatggcgagtagcagttgcagcagatctatctctgtttcaaattctgattctctcggtgttttttgtttgagctagggctaaattagtttccttcttgggtttttattcgtaatccgattcaaagtttgtatctttgggagggatgggtaagaggcaaatatcacaagatgaagtaggtccgcccataaaaccaagagctggtttacgaagggaacaagctggaagaggttcttacagaggtagttagttactttgtatctcatcgaaaacgaatcaaaagaagcttctttttttttttattagaggttggggaggagatagtataaaacaactgtttagagttctgatttgtggtttttgagtccggggttttgaggtttaccctttagaatgggttctacttctcaagagatactgaagagcttttgctttaacacggactgggactatgctgtgttctggcaacttaatcatcgaggatctcgaatgtgagtcatctaaacaattctctttactgtctttgcgtggtggatcattataattgtctacgagttagaactgtggtaattgatttaggtgtattgacttcaacttgctagagtggaaatatggaaccttatatcgaaatgcagcagctttaagttaacaattgtagtttaagtgtctgaagattgtttctgtacttttaagttttgtgtgcagttcaggattctatttctttatatgttttagtgttttagttgaccagatagtttctcaattttttgaataatgaacacctgtagggtacttaccttggaggatgcttactatgaccatcatgggacgaatatgcatggagcacatgacccccttgggttagctgtggcaaagatgtcttatcatgtctattctctaggggaagggtaagaatatattgctctgattcactcttatcatgcctatagtttgatgtgccctttttccttctttttttatttgacagtagccacataatgcaaagcttttgttgtgtccttgagcttgatgttagcttttacaatagttaacaatcttgggtctattgttgaattatgttatcatatctatataaacaggattgtaggacaagttgcagtttctggagaacaccaatgggtatttcccgaaaattataacaactgtaactcagcatttgaggttagggactttctatctgaaattaaatttgttttcttcgtgtttttaaaccaaatgtctttttttaattacagtttcataacgtttgggaaagtcaaatttctgctggaattaaggtatttggatttttctttagtgctctttctgtctgctttattatacatacttgtcaagaacatcctcaaagtttgccactggagactttcctttttaaaatatctattcttccttctccgcagaccattcttgtagtagctgttggtccatgtggagttgttcagctaggctctttgtgtaaagtaagtaagatcttaaaattggatgcggtgttcgcagttacaaaataatagccaggaagaacacctgcacacttataatagatggcacatatatacatatctggtcttattttgtatttgtttggagcaggttaatgaagatgtgaattttgtgaatcatatccgacatttatttctggcacttagggatccattggcagaccatgcagcaaatttaaggcaatgtaatatgaacaattcgttatgtctggtaaagatcttcttcattcaaatatggattcatgttttttctagatttcttgttatttgcaaaatggggagagtaaagtgcttagggttcttctaacagttactcaaacctccactgacttcctgagtagaccatgatgtgttgtataattttgttgcagccaaaaatgccttctgaaggtttacatgctgaggctttccctgattgctctggagaagttgacaaagctatggacgtggaagagtccaatattctaactcaatacaaaactagaagaagtgatagcatgccttacaatactccttcgtcatgtcttgtcatggagaaggcagcccaagttgttggtggtcgtgaagttgtgcaaggatctacttgtgggagttatagtggtgttacgtttggctttccagttgacttggttggtgccaaacatgagaatcaagtaggtactaatataatcagggatgcacctcatgtgggaatgactagtggctgcaaagattcaagggatttagatcctaatttacatctgtatatgaagaatcatgtgctcaatgatacaagcacatctgctttagcaattgaggctgaaagattgataacaagccaatcatatccacgcctggactcaacttttcaggctacctcgagaacagataaagaaagttcttaccataatgaagtgttccaactatctgagaaccaaggaaataaatacataaaagagactgagcgtatgctggggaggaactgcgagtctagtcaatttgatgctttgatctcatctgggtatacttttgctggcagcgagctactagaagcgttaggctctgctttcaagcaaacgaacactggtcaggaggagctactgaagtctgaacatggttcaacaatgagaccaacagacgatatgagtcatagccagctcacgtttgaccctggccctgagaatcttctagatgctgtggttgctaatgtgtgtcaaagagatggtaatgcgagggatgatatgatgtcgagcagatcggtacaatcattgcttactaacatggaactggcagaaccctcaggtcagaagaagcataatattgttaacccaattaatagtgctatgaatcagccaccaatggcagaggtggatacccaacaaaattcatcagatatttgtggagcgttttcttcaattggattctcatctacgtaccccagctcctctagtgatcagtttcagacatccctggacatacccaagaagaacaaaaagagggccaaacctggtgaaagttctcgacctcgcccaagagacaggcaacttattcaagatcgaatcaaggaacttagagaacttgtgcctaatggatctaaggtgatttttctcttcctagctacaagattacttgcaccttcctttgtaatgaatttaacttataatatatttttgtcattcactaatatttttgtcacattttcagtgcagtatcgattctttgctagaacgaacgatcaaacacatgctctttttgcagaatgttactaagcatgctgaaaagctcagtaaaagtgctaatgaaaaggtaaaaatgtcagctttcttgataactgataatctctgttctatcctagaaatttttattccagcctccatagtttgtaaatgaacacattaagcagtttgttaggtttgattgattgatgtagcaaatagtggatcaaatttctgaatccttgaatgagaagataggattattaggcacatggagatatatagaaaaactcaactgaaaatcagaagtaaatatcaaaattagcttatacctttgtaatctcagatgcaacaaaaggaaactggtatgcaaggttcaagctgcgcagtggaggttggaggtcatcttcaagtaagctcgatcatcgtggagaatctgaacaagcaggggatggtgcttatcgaggtatgtaatcttacattttgtctcttttctttggtttagtttaatctttgtttgaactcgagtcccaagttctgcgagtgtgtattaaaagtatttttgggtattggacagatgttatgtgaagaatgtggccattttcttgagatagcaaacgtcataaggagcttagacctcgtcatcctaagaggtttcaccgagactcagggcgagaaaacatggatatgctttgtaactgaggtaggaagtcgaattacccaattcatgaaagagattccaaagcaaatcaaagtattttccttggttttgattgaactttggattagtatgatatatatgactgactaacatcgagatactgatatatgaatggcagagccaaaacagcaaagtaatgcagaggatggacattttgtggtctctggtgcaaatatttcaaccaaaggccaatgagaaggggtaacaggcgtggttgcagagtttgcgtttacgtaagataaagaataggcttgtgtgggcttgtacagtgttgttgtgacactcactgcaatactttcatttgtttgttttgattttttgtataaaagataggacttcaaagttgagtgtttagtgtgtttatgatttgcatttgtttgcttttgagtttttggaccctttgaagtttgtatatatacatgacttgaaactttgattttcttcatacgtttgatttgcaagctgtggaattataaattaatggttagaaatttgcaagcatgcattgtaattatcataatcaaaactgagtaaacaacaaacactaaacccaaacaaagaagtcttagaaagaagaaagctttcactttcaccagcactagtccctgttctgccacagtctcttcgctgcagagagtaagggcataaaatttgttccttcgaatctcgggttcagaagcaaaatctcttttctacctcttgtcgaaactgtggcgttgttgagtctgatgaatcgacttcaaaggcttctcctttctgctcctcgcttatctcctccgatcatacttccttcgtggcggtattagggttctgttttgctcctctgatactctaaaggtggaggcttttctatttctttttgcttataaccaatcgcattcgtcaataattgaagtttgagtttgattaggtttggtagtcagagactgatatggctatgacacgagagttatatcggattctgggtaccaagtatgctccattgttaatccgaagattctcactttggtcaacgaagaaagaccctgatctcgaatctgctctctcgcgtaacaagcgatggattgttaacagtcggctcaagaacattatcttaaggtgtcccaatcaggttgcatcgattaagtttctacagaagaagtttaagactcttgatcttcaggggaaagccttgaattggcttaagaaatacccttgttgtttccatgtttatctcgagaacgatgagtattactgtaggttaacgaaaccgatgatgacgcttgtggaagaggaagagttggtcaaagatacacaagagcctgtactcgcagataggcttgcaaagctgcttatgttgagtgttaatcagcgtctcaatgtcgtgaagcttaacgagtttaagcggagctttggattccctgatgattatgttatcagaatagttccaaagtactcagatgtgtttcggttagtgaattatagtggtaggaagagttcaatggagattgagcttttgttgtggaagcctgagttggctgtctctgcagttgaagcagcagcaaagaaatgtggctctgagcctagtttctcttgctctctaccttccacgtggaccaaaccgtgggagaggttcatggagtttaatgcctttccttacatatctccgtatgaggatcatggggatcttgttgagggttcaaaggagagtgagaagagaagtgttggtttggtgcacgagttactctcgttgacgttgtggaaaaagctgtcaatcgtaaagctgagtcatttcaagagggaatttgggttaccggagaagctaaatggtatgcttctgaagcatccaggcatattctacgttggaaacaagtatcaggttcacactgtgatcctcagagaaggatacaatggctcggaattgattcacaaggacccgctcgttgttgtgaaggataaatttggggaattgatgcagcagggcttgtatgagtataatcacaggcgatatttggctaatctagagaagaagagagagaaaggtattgaatctttgaagcctgtggtgcgaaagaaagacaggaaccacgatcgagatgatgtcgatgaagaagaaaaccatggggatcgaccaggtggtctgtttgatccagaagagagaaaaaggttttatcagattctcttcagtgacacccaataagaacattctggtaaagttggacgttctcttcagattctcttcagtgacacccaatggagaaaaatttacctatatagtctgcaatctctaagacgttgtgctttttctgaaagctacgaagatcacaatatgcttgtaaacaaatgcaaaatacgagttgttccccgcagatgctagatcaagatagaatctgtgaattaaggcagctggaatactttcacttagttcagtttgggcgggaatcaagagttaagagttctctgaaacaatgctatatacttcatgaacgtggtccagaaattgagtgaaaacatttgcacgtacttggaattttcccgatatgtgttcttggtttcacatttggtctgtgtataaagtcaccttgcagcttcctaaaggacataccagtggtcaaattttctaacccctgaagaccgtacgtacgtgcttcagttgatgtaagccatgttttgattacacagatattaagcggagcttttgattccccgatgattatgtcagatgatactagtgtcagcttcattctggattgtatatatcatcacagatgaaaagattcatttcaagtttgttgatatatagcattcatttctgtggttgttgtccggagaactcattcgacacaaagctgaaaatgttattatgttaatatacaagataccaactcgtataatgaatcaaatgatagagcattcaagatattacaaagatccagagacaagggcatagctcaaaacttaataacacctgcccttacacaaaccaggaaaacatggcctttattatgcagtttaccaagtgtgacaattacgaaattggaaaaaggtgaaaaggctagtcgaaacaaaatctgatatacaaattaagtaagctgactactgatccagattttattaaaactgattgccaagttcttgttgcatgttctctagatcccatatggctattttgccatccaatcctataaataataaaccgaaaatgcgagctaatgaaacctgtcattttgtatgaattgaatcgggtgattccatgaagggttatataaatttaaatttagtgactgacctgaagtgctgaatcgcataactttaggactccctcctttgcccagaggcacaatggaactgcaggtaaacttctacgtcagctcttaacagataatcaagtaaaagagctaaagagacagttttttggcaaatgatttggtacaagccaagttagataaagaaacaattacgttatgctgttatcatgaacgcctccacgtgaatcagaagcatcgttggctgttgtagactttgattgactaccgtagaattttccaaacgcttcggaaaactgaaaaataacataatgaacagatgtgtcagacacaacacaacaaaataatgcaagtggaaagtcgtatcgtaaatccaagaaaaaaagaaagagaggaactacactaacccccaaagattacgatctttagaggaacaactcagggataagttaaagttcagtcatatttttttcactaaaaggctaaaaccagacatattgcaatataagaaagaagatttggtatgtacctgcgaactgtaactggaacctgaagatgccgctttcttctctccaatgtatcttatgaagctcctacagaccaaatacaaaaacttgtaaacgaagcaattattggtagtggttcgtttcagaaccaacaatccggcctgtgatctaagaggaataaaagaactgaaaatttgatagtatgcaaacccctaagaaagagaattttaagcagatatttctgagagttacacaccatattccagtatcatctgcagcaaataccatcgggttgctgtcatatccaacccctatcaccattttctcagaaataaacaggacctgaaatagcaatttccccataatatatcaattcaggacataacacaccggagaaaccaggttctcaaaagtaaaataaaggtggatgctgacccacatcacgaagaggcaaatctcggaatgcaacgctttgggctaaaggagaagggccaacatcatcaacaaagtaaatcatggagctatgacctatacatgattacataaacacgcaaagtatgacagatggtagtaaaaactgcaaccaagttgaagttccattgtattatttcagtagagcgcaatggaaaaacatcccaagtctgaaggattttctgacctacatatgctaaggtgtttccacttggagaccatttaacaccaaatgcccaagaatatgagagatcaagctgaagaatttgctgtttcaacaaagccacagtagaaaaaaaaactccctaacattagatgagagagtagacggaacatatatatggcacaagaattataatatttactaaaagaaggaaagccagccaaactagtcgaacctccccaaatttcgtttccgctggtgagcctgcttttgaatccctgtatcagcccattgaaagaaaaataagaaatggcctcatgtttgaaaaaatgtcttaaaagtagacgttcaagtaatgagcatactttgtgtcaactcctttgatgaatgttgaaaatacccgacattttccatctgttgatgtcgttgccagaagaacctaatgcataacagacaatcagagagcacagcaacataaaaaagcatacgagaaaaaatgatttagaagattaactagtttgtggagattgatattctatttttagggatcatgtactctatactcaatctggtggccaacttatagaatatttttggtagagaaagcttttacagagagcctgcttaatattttggctacatgaactacaagaggttctgttgattgcacgtacattattaggatgccaagcaacagatgtgactgaagattcgtgccttttccggattagcttactgacccacctgcaaacagtaaagccaagcaatgtcagatactaaaagtttacatgaaagtatctttctaaaatctctaaacaatacacagttatgcatgccaagataataaaaaatatgattggtgctaatatcatgccagtacataagacaagataatatcattacatagaccaacaacaccattcgtagcaaagaagtcaggaaacttgccaaagaaaaaatcaaggactaataatgagaattaggagcagaagaagaaaataccagttattctcttgctcataatagcaaatacaaacagttttagcaccacttccaacagcaaacttgttctctatgggtattgagcaaaaagatgagaacatagattagaagctgtagaaattataggaaaattacatgatatattacggaaattaagcttaagaaccagaaaaattaaacatttacctttggggctccattggacacaaagtgcagcacgatttagtctaagaataacgagagttggtacccattcagctccttccaggctccagacgtaccttcaagaagcattctaaactcagttcaacgaacgaaaaaaagtgaaggactaagattaacaggtttggagtttctcaaagtatatcaaaggtagcaacttacgagttcctgtcatgagaaacagtgacgattttgttggactttgagctccaatctattccagaaacaatttggtcatgctgcaacaagacgaacaataatcatgaagttgttgtaagggagattcaagctgtctatacaacacttatcagcgacaagtgatcagtgaaatgagaatacataaatatacgaaagtaaggaattcccaagaagagaaagcaaaaggagtgcaagttcaaaagttacagaaagagagggagagagaaaggtttcaccttttggaggacatgtaacctctcccagtggtcttgagacaatgatttatagatatgaacttcagtgttgttaggacagagagcaaccactaccaagaaaaacgaaacaaatgtcaaagcacataaatggttacaggctttagtacagacgttaaatcatttgtaacaatagatttggttcatctgtttagaaaagcgcatctactaatgtacaatactagataccaagtgctcctaacaagagacaccgacaaacagacatataaaacattgactcgaaaattctcaattatagggatttagaagaaacttgattaccaagatgtataagaataacacaagtcaattcagaaaaactaactaaagatcctcctcatttataattctaaaaacagaaaaacgacggaagagagaaagaagagaatcacaaaatcagagaggtgttagaaacatactggagagatcaggactccaagcatggcaagtgattgactcagcgaaacgatgaacatccaccactgccatgagtgatccttgttgtcccaaatgtgttgtaatgaagacagtcttttctctcaaattgacatctacagatttctaaaacggagtcgtacggtgaatagatggacagataattatgatgaaacgccgatgagatccggagcttgacgacgacacagtcgcaaacgtgaagtgaaagtgtaagtgaaagagacggatgtttttgtttgtgtgttttattttactcttatagcccaattttttatgaccagatcattttctattttccttggccctgtcttaggggcggcccagcataataataagcaaaaaaaaaaataagatctaaattctgcattagttaaatacttaaatatacataattggatttaatcaaatccatccatgtaaaaatctgaactaaacctcactatgagtatgagtaacttataaagtcattctatatattcagttttcgaatcccaaataagttaacattatagttttctcaaaattaattacactgtattagtcttttttctaatatatatattaacatttcttagaaaataaatataaaattagaccgaattttttttttttttttttttttggttggagcgactaaatttctccatcggcgaaagaaaaaaaaaacaaaacgaaaaaaaaaaaaagtttctcgattcaacaagcgtcccttcctccttggggattcacaggtttgcttcttcgtcgatttgattctttgaatctttttttcccctaggtttaggtttcgctattgtttctacgatcgaaactaggtctctctattgtttactgcaacatttgattctcaatttcatatcaccgatttgtgtttatcccctggaattaggaatgattagggttcagatctcgtaggcaatgaatttagggttagagaaatagcatctgtttggtttgtttacctaaagaatgaaccctaaaggctttgttctgttttacgattttgtttaaggtcttagtttttatctttagctcttgtcattcttaagcatgttgttagttgttactattaagaacttttattctctgttcttgtattttggtaccttatgaaattagtcttttatgcagattttgaaagctaatcttcagctatgagcacagcaacaaggccttcctcttcagcaacaacttctgtcatattagaaaaccctgtttctcaatcacaacctactgaaagattagtgcttcggttgaaccggaagaagaagaaagtttcatggaaagatgggactgtagacaatgagtttatgcagaagaagagttcgaagaagtgttgcatctttcataaacagaagccttttgatgaggatgacagtgaagaagaagatgataacaaccatcactgtgatcataaccatgaacactccgaatctggtgaggcatcttcttctaatgattctaaagccgttgactaatcaatcaggttttttcacgttactatatattgaagctttttaatagatcatggaagaacacacatttgttgttttggtctcttctcctatctaaccctggttgggcgttatgtatatgtacaagtaatttgcagattcattgcaatgttaactccttcatactctgttgaaaatgatgtgaatcattgaagattgctaattagttaaagaattacaaggatgttatattttctttctacatttgaatatgcttttgcttttgcttttgcgactgcatactatttctcaaaatgcaatgttcgggtttcatcaattaaaagatgagcactatattattttcccagtagaataggatttgcaaagggtaagtataatgtttgggtttcattggccgatgttgggatcaatgcagcttctggatcagatgggttgtgattaggatcgataaaaaaatatgaccgatatggcagaacgatgtagctactggtcggatggtttggttggctagatcggtggctctatgaccatgatggttgatcgatgcgggttatttagttggctccagggatattggatctgcatttgactgatgggcacggccaatgtggcttatgagggttgtttgaggagtcctagatcagtcattggtgagaccgatcccatggccgtactggttctgttatttctttgttccccggtccttctttgaccaaaactccgtcttttccgcaaactctaggcacaagttaggatatctaaagacacccgaaatccttaacatagataagaaaacaaaaataaagcttcaaactcaaatttttcttactatttttaatctccactaaaccaacattaagtcataaatccactatcagttgttcattattatcgaataatttaacttttgtacttgatcaattattttggaatatttttgatgttaatcatgattcatgattaatatgtgggctggataatcatgggtctctctatttttctagtctgtaaagtttgatcgaaactgagagcattttaaaatatttaaatcgagatatagaaataacttgtctcatatactactaatatcaaatgcctttgttcttattctacacacatctcaatcacttatgtggtgtatatgttgagcattgttaaatcttaaactattgttttccaaattaagcaataatgacaacaatcttaacataatttcacaagtacatgtaaattttcaactaaacaaacactaaaagtaaactctaatttatttttctaaataaaataagagagtaaattagttatgaattaaaaaaaagctaaaaccacaacaaaaagcaacttgggtttggttcatgtttactcattgttttgtcctatacgtcaaccaaatctctcatttgatcggatcttaatattaatatggttctctcaatattttcttaagaatattctccaccttaagagtttaatctcaataatatattacaacgagttattgaatattagagagatgttttacaatataaacttgagggaaaatataaaagctgcaatcttgtaattgtaagccattagagagacaaatatgtaaaataacaagttgagttatcataaatcccaccttagtcctttaccataaacactcgtgcactatataatcgtcactagaagagtataagtaatgaagtattaatattcctacaagatagtaatagttggttaatatcaatagattataattacgttttgagaatgggaggtttaggctcaccatgtggaggatgcaagttcttgcgtaggaaatgtgtagagggttgtgtatttgcaccatacttttgctacgaagaaggatcttctaattttgcagccattcacaaagtgtttggagctagcaacttctctaagctcatttctcatctccctgatcatgaccgatgtgacgccgtacgaaccatctcttacgaggctcactctcgtctccatgatcctatttacggctgcgtctcccaaatcttctccctccaacaacaggtattatactttttcttcggaaatgtatacataatttttttttgcttttgcttcatcatctctagtgtacttacaagtaacttcactgactttgttcttaaggttgttagtttacaagcacaagtggttctacttagagaagaagcttcgagaaggttccctcaagatgatcctggttgtaatatgaagcaacaagaaaaggttcttgctcaacaaatgccacaagatcttcacaattggtttcaccaaggaatcttggactcagacttcgacccaatgagtggtactacacgcgacaatgagcggtccatggatcataatgagtctccttgtagctcaaatgaatcacttaattactaccaggaggtcaattttccttggtctgtttgagtacaagtgactactttgtcagagatggaaccttacaatctttctattgtatcgacttttcgacatttttcatagtagagatcgaatcatgcaaccattttctctttgagaataaccacttcttcgatgatctttcataggtacaacatcagatctgaacaagtgtcaagtcttaagaagtgtcattactgagaaaaagcataacaaaatgtagtgtacgctgttttaaaaccagaaacatctacaacgccagagagttaaatctgtgactacatgttggattcgatttatcaaaagacatttagttacaaaagttaagtcttcgtgttggattcgatttcccaaaaaaacatttagttaacagaagtgacgtcttcttgtttggttcaggctcatctcttgtgcttaaaccttactttcaacaagaactgcaacttcacctgttcagagacaaagcaatctttgtcagacatgtacacaccataaaagaatcaaacacagaatatgttgcaaaactaatagctaaagccgtattctaaagcatgagctttctagggaattcagttctcattcccaagtacccgataagaacaaaagaggactttagtgtgtgcgcaatatcccattgttgtaaggaacaaggaagattattttggaaacacaagttacctgggctgtatcgtagacgatatactcattgtacataagctcagaagccttgacctttgatgaaacaggttttccacagggaacagtcacatcacctctccacttggcaaactcggaatcttgaggcactttcttgccgagccctttggtcgagtgtttccctctcggaggtttatccatatactaaagaattgaggacataagagaaagtcatatatgaaggtaagtaatatcttaagttgttcatatagttttcaagataagaaccaaatggttagtagcataacctgaaaaactgtaatatgggctcaccttagcttttgttagctcatgtatttctcccaatgcaacttcactcagaagcattagacccaccggatttttcttacaagtgtagcagtactgagcacttttactgacaaggtcagcaaagtatatcccttttccaaactgaaacatggggtttaaaaaaagttcagattctctaacaagttaactagatagtgaagaactctcaattgataagatccccacaaataagacacagatagagtactgaccatgtaaccagtagcaggagcttctggaggtgcaattctcagtccttggttcaatattccaacaaaattcgttaatcgagaacctgaaagcagatttattttggttaaaccaagggttttgatgatcaaccagccaaatatatagaatcaaccaaacaatgaaatttcttgtatctgtttcccaaagcatgtaaatgtggctggttgcagttggcttaccatgccataggagcatcttattgccaagtttttctctgtggggagcatatttatcaaactctccttctctttcaagagcaaaaacttcctctagctcaagactccactcctgacaaatccagtgaccagaaattgaattagaaaattatgataaacaaaacatgaaaagggataaacagagcttgaactcactgtatgcgttggggcatgagttgtgttaagatacttctcgattaatcgataatcttcgctatcatgaggaagtggtgagatatcgcaatgcagcttcttatacttatcatcaagagattcggtgctatcaacatcaaagccaactattcttgaagctatttcgatatcctgcagagcctcgagcattttcacctgtgacacacagatacaatacctctttgtaacacagaaaaagaggctaggaattaaaaaacaacaccatggttcatgttctatggcaagtacctttgacttaaagtcatcttcatctcggataatatgaggatgaatagaagggatcatggtaaaaaatctgttactagcatcaacaagcaagctttctttcatagtaggctgggggtcgctttcagtcaatagcctctgtatctccgtcaatgcctcaaaacctttagaagaacaaacaagaaaaaacataatagaatgtaatgtagaattaacattttattatttttatcatataaaaaagtaaactagagaagtaggagttacccttctgtatattatgtttgctgagcttcccaagtggcatctctgacatatttatctcgaactccatcattgcagatctgcggaagtaattattaggttacttcatacagtttctagggagagaagaggagaagaagacaatggcaaataagtttctaacctgtaagtttccacatcaaaaagcatcttcatcaattctattaatgatggagcaaggttgctactggtctgaaatggctcttttttggctacttgcttattaactccataatcctaaaacaaacgatacaaaagagtttattgaacgatacataagagaatcttaagagacaaagatatagtcatatggatgcttacaatgtccaacgggagaaattttccaggttgtttctggaaattcgttttttgttcccaagattcccatgtgtttccggttttttcaagaaatagacgtttgaattcgtgaaccgcatcagactttgacatttcctccactttgttaccaccaatcttttcatttccaactcggccccatttacgaaatacgtaacaatctgaacctttatcttcttggattatctggagtatgtaataactattgataccggtagagagatcagacatgctcagagttgtgttatagatactgttcccatcttcaagaatgtgacagtgctcttggaggccagacgcttcatgcacagcgcttcgtccttttactttaacagtgacaaggctctcactagtgtcttcaattttgtacttgtcaaatggaagtttcctctgttttttaaaacaatcaaccaaataatcctctctcacgattgccactttcatcctcctgccacacatttatcaactccagcgttcaaagtgagaaaaaatagtgtgacaaagttaaagagtatcagcacaatgaaggcaatattctaccttgcctttctcatttcagcgtctctgatatctgtcagtccacaaacaaccaaacagcttgtacctacaaatttgtgaaacagagatattcaaaagctaaaactagtgtcacaataatcaaaaatagacactcgagttatccataccttttttaacattagcatgaaactctgcaccagcttcctcaattctcttcttccatggttgctgcaaaatgatcccatcaagcaatgaagtgcaaagatagtctacaatataatttttgacagaagaacataccctttccttagtatttccagcaattgaaactttaagatctgctagcctttcactccttgaggagtcagttgcatctttagaaccttgaccctgagatgtctcgccagacaatacaggacgcagaatacgttttggcttcacactcttttgagacttattccactgcaagtaatcaaaatataaatattaacttcatgagtaatatataccacatctaacctaacccataccaatatcaactctacaaaaagactggtttaccttcagaaggaattgattttctgtttcgtcagggattttccacttccctttgatgcggtctggatccaaagtggaatgagaacatttgctccattctgagatgtatccatggcatcggtaaagtcctccggagaaagaaagatgcccagagcacattgggcagagagcgagtgggccaaacatcatgccatcagcactaaatagaaacaaatagagaggttaggcatatgattatgcatcggtttctctaatccaaattacctttaagaagatccacacaacagtaacagaaatagaacaaaagacaagcaattaacttccagacagattcgcaaagtaatttaccatttatcacgcagatcaagttcagatcctcttgtactttgttcatttacttcaagcatttcccgcaactcagctgatgttacatattttttcagatcatccttcaggtcccacaattccttagtttgggcctccatttccttttctttgctacaaggttgtaaagcaccacttgtagacatgtcaaaactactttttgctagtttcgacttctcgttatcaacagaatcattttttcgttttgtgcctgctcttgaatttgtttgacgtgcttctgctgtctctgtcccagttgggccaaaataaattaacggaaagatcagactaaagtactgcaaatcaggatcctgtaacaaggaaatcaatatattaccgtacaccttaagactcttaccagttttggctgccggcagagctttcttcactaagggaagaagagcttcttggtctgagtctggtatacttctccatccagacaaactttccagttcagtagaggaagacatttcaaggaaacatttagcgtgatgccacatcaaacctttgttacccgggccttcaggcttggagaatatacgtacctggaaaacaaaaatgcaaaacaaaaccctaatgcatatcgaaccagttcatataaaacgctacaaccatgacagatgaagtagaacaacaatttacctctcctttcaagatcttttcgctacactttctgcaaccggcacgagaagtttgtgacacttcaatcccatattctagtttggcattattagcggtactgctcgtgcttgtgcctgtgcttgtgcttgtgttactccctgctccagattcgacatattttctaatcttttgctgatcttcccaacgaagtgattctatgccttcaacatcatcaactctagcaaaatcaagagacaaaaacgagttaatagccaaacactttaaatatttgttcaaagtgacattggttttacatacgattttatctgcttcgtcttctttagtatacaagaagcatggttccacatctgtgtgagaaaaataaaagtacaaagaggatagtcagctaggaaaacttcatgtcaactggagctaaaagcaacatataattaacatggtgaagtgaagcagcatgaagaaggaactacatagtgaaaagaagaagagaagaatgaccactgccattccattaaacaacaagcataaaagctcatgaaaaacacagctgattgcaatcatagcattggcggcataaagatatcaaaacacagctaaacaaacgattatgatcatccaaacagaataacgtcagagttccaaagggaataataggagttcacatacgtcattgcagaaaagcacgaaccttttggcaatcatcaagtactaaataaacacacaagtgactcaaatttaagcttcaaatgctcttttatcacattcgattaggcacaaaaggaggaaagaacataatgtgaggaaggttaacatctatttaagaagttaaaaaagttccaattttgagatagaaaacaagcttgacacacacacacacacaaatttgcaaggaatgtagaacagtggaagcagagagaacaggattgaaccctcaaaaataaccaatttcaaccaaataaacccaatttgtctgacaataattctaaaagaatcaattttgtcctcaaaatcagaaagaaacattagaacgcacactaacaagcacgagagtatagtacagagacagttccaaattctgggagagaaaagagagtcatacgggcatgatgccatcgaagtgagtagattgaaccaactttccaagacgaaagttctccttgttaatgacggacttgcaagttttacatgaagacctcgacgactttgcatactccgccctccacggcttatgtgggcttgccatttctccggtaagagacaattacacaatgcgagagtactatttatacgtatggcttctctatcgaagatgattatgatgacgacggattgaggaatgtttcaggtgagagtaaagcttctcggcgacgcttttccagattgtgtttctaccgtttaaccctttttcccttttttaccctaaaaagtctgttttaagattattgctttcaattattattttgataatcagatttattcaatgatttaatttgatatcagattagtaaatcaataatttgcaccctccgttatgcaatagacgatgattactatcacttgttgttttatatttttgagacaggaagaaaagattatgtgaacataaaattatggctataaaatgacaatagggaattgaaaaaagaaaaaagaaaatagcattggtgaaaaatatattaacaaaaaaaatcaacaaatcatggacgaattcgcagaatccgtcgaacgattgaatcatggtggttgtatatttcggaaaacatctgtacatttctagtttacattggaacaaaaatgagaattttgaccacgtaagagctacattgctaaattaaatccgacatgttttgtgttagttttcgaaacagcagttagcgtctctttgaggttagaagcttggtatagggtagagattgttcgtaataacgacgataaggtctcgagatttttggaactgtgacaattacgcgaatgtccatctttaattcggcgttcagaatcagtgtttcttcttgaaaaactgctagttgaatttctcatttagtttatttgttgtgtttttgtttcgattttttttttttttagctttgcagccttttttcgctataattatatgattgcattttccatcaaaattttcagaatattgtactaacaaaaaaaatccaacatgtactacaagaagcaaaaaaatatgaaattgatcaccataatttgtcagaaaatcaaaccgggaatacactaatcaagttggaccgtaataacatcccgggtgcattttcctcctatttgcttaaaaattcgtgagacgcgtgatcttcttcgcccttccgtatgagcaagaaatcttgcggtccaagacaaaaccggtttacgtgttaacttgtttaatcagtctcaatctttattttctagttcaaatgtcgagaaccaattttttccaactaaaaagtcaatccataagaatccaagtaaaccctccctgacgacaaaaaaaaagtaaaccctccctctctatatatttaactcatattcatatctttcaatgcgacacaaaagagtaaacgaacttactacaaatactttttagtacaaagaaacaaagttaaagtgatgattatgaagaattaagtaatctttggagtgattatgcttgccatttttgtggttttcttggactccacaaaagtagaagccacgaggatgttaagaatcaccttcgatagtgatatccggttcgtgttcgagtccttgcagaagggtacggtccctggatctggtcctaaccgttgctctcacatccccaaaggctcgggttcgtgccacggatgatccctcttgtgaatctcaagcttgatctcaataccaaaatttggactatgggtggaactttttgtattcatttttgttgtatacgagaaactatgctttacatgttcttgtaagttgtaacaaagctatgagagcaaatttgtttgaaagtataagtttgtttaacaaatttgtaatagtactggaaatgtttgataaccggaataatagtcttcttatttggtttaagagacgataaatgattcagattgtataaaccggttcatattggttcgattgtataaaccggttgagattggttcgagttgaaatttgttcttcgttggcgagagatccttgaacgcttaaaccctccatggttttggattgaacatttcccctgagatttgggagtgtccttaaaccccatacactgatcgagctcaagaagaaggagaagcagagaaatggtgaataaacattggaagataattccaaagccgcttctagaaacagttctcaacaaccatgtccaacgccaccgtgttcctcagcctctcatcctccatggtcctcgtggcgtcggcaaaaccacattgatcctcaaccgtaaaatcctctctttgaatccctaatttccccaattttgttcaaatgatcgtacctttgattcgttcccgatctcgttcttattaggtctactcggagattggaacaaagggccacatctcgctggctatgtagattttgcgcaatcgataacggaacaccatccagatcaccaccaatcatatccatggacgtcttggaccagtgttgacccaccgttgttgtccaattgcaaaacccagctcgagaattgtcttgaatctatgagtcacaaagctatcaaacttgggagtataagctcgcagcagattttcactactatgaacaaatggtatggtcttaatactgcacttcgtcgtatacttcagggttataacattgctgttccagagaaagtctcggtttcatttctctgggaacgggctgtgtatgccctatctgttcgacaaaatgccgatgagattgatgggttgcttgaattggaagagaaaggtaatagcttgtccgttgaagaggcttcgtattatagagagactgcttttgcgttaagattggctaaagaggttattaaggtgcaccagggttggaaagccaatgccattgctcatcttaatcgaactaatgggttttcgagaactttagcgaattcatgtactgattggccgttgctaatgcttgagttgttatcacaagctgcagagattggcttcttccaggtaatggaatagataagtaatggaatggaatctttgatcttatgagtggtaaacagtaaatgtattcatctggaaacagtttgccaactattgatgttatttttgtttgtctctatttcttgtttcatttgacagcctaagctggtcttgaacaacattgaaatcttgaagagggctattcagactgatgattcaacagtctcagcgtcaatgtaccatgacaatcttatttggagaataatagcgttaggtgcgaatgagcgctgtctacctgtcctattcgtgacttcggacaggtttgtcctgttttttgttagcatttttgggtttaataaggacaatctgttactatctgatgattacgtggtctcttaatctagcctttaagtttcaatttctcaacactagaggggaaactggtttctgacttgtatcactttgtagtatgccattaagttaccgaaagtctgaataatcattttccattctgaacttggctcttagttacagaaatgtcttttgaaacttttttatcattttatctgatgtctaataatttgaattatgacagctactattcatatcaagcctttgttgactacgggtttccagacattttcatctctcgtgaggtatagaagctacatgtatacatctaagtaaactattgattctgtgtgtatttgtgtgagcatgtattggtaatttgatatattatgtagagtttccccgtctcaccttcattatatcaacatgaaagttcattttttatttttcttcattctacctttcttacgttgcactttggctttgtttcatttgtagacatttggatggaatcctcaagaagcaaaattacacatggttcctgattacttcagtgcttcggaggtgagaaaaatgctgtaggtaatggcactgcttgtttaatgaaaccaaaatatgtgacaactctaaaacctaataatatcaaaccagaaaggttgaatgatcttttatgctaaaattttactggtcattctttttttaattgagatgctgtatattactagaggtttaacatatgttggaattgtagtggactatcattgctgatgttcttggtgcgaattctcggcatctatttgagctttatgcgcttaaacaaagtaatcattaccagaggtaatggtttcctgttctttcgtttgctctaatctcaaaatgtgtcaaccctctattttttcgtttctcaaatgtgacctagtgccgttgtgttttatcagtttgatggggagtaaagcaggtacatttgaagatattgtggatgcatacttggcatatttacaagtaagctcatttaaagtgattgctttcaaattacgcacgaaagtcatcgttaattttatagtctatttccttgtttaggttgctgtggttaatcctgcaatggacaaagcgttgttgcggcttcaacggtatgccactgatgtacgaaaaggaagcattccgtatgaaaaattacgttttggtgcttcatggaggcatcctccgcaaactgaggatcctacacagaactctgagtgggctaaaattcagctgatggattttgtccaagctcttgtcaatacagaattcgcggtacctactcttctagacccttgatggaaataaagccaaagtgttcagttttaccttatcggacatgaaactaatgattatagcatcactaatagtgtacaagcatcaatgattctataggtaaattatttgggtgactatagccttgagatctttgaagacccttcagctatggcattggttgaggtaaaaacttctatcttttcttgatcagtagacactaatttcgagacccattttactaaaaactgattaattctgtttcaggttgggatactgtatactcagcgagatccatcttttttccggccaatatctcaaggcattaaaagatgccttgttagatggtcagcaaactttcttcccttctcctatggatctgctctttgaaactctgtttttttacttacgctcatgatttgcattacaggctcatccaagagcggatgcagatgagttattggagctcaacaaaatattggtggcagagaatcatccggggtcgttattacaagcatttaatgcttggctacagaacataggcagtttcacacaggtagagacgattacacgctctgtttctagctctcttgcatcacattgctttagaggataatgaacttaggactttcgtaaactttcgattcaaaaacttatctgttcaagttgatgcgttagcatcgatgaatcctcaagtctcaacaaacgtacaatgttgctgttacttctactgataaaactaattatcccaagtttcacacatcaatgcaggttttgttttcacaggaacgtcgatgaaatctcggtatcttgtgcacgtacacatgtcggactcaggttttaccgtgaagtagaaaacataaaggggcgttgtttttgttgccgtcaaggtctgacttttagtaaaatcacattaagaagagacgtcggagggaaaaacctccagctacagaacggtgtaatcgtgtaagtgggaatacattgccatgagaacgtctttctcttcagacgctgtatataaagcgcatgttgctgtgtttatgtcgatttttttcaagtaaaattataagtcaaagaattcaattattcactgtattgtctacctttccaagccgaaaagtccaataaagtttgttgttaaaatgaaaaatctttggattgttacatttacatttttcttgaccaactagtgaatagtgaaaaaacatgtttgtattgagtacaaacacgctaatagactaattaaatttccgttgattacaattcaattacatgagacgaagtctaaagctatcgtataattacgtaaatgtaattatgtacgtaacacacaaatgtgaggaaaaaaaatatggaattaaagaatgatgaagatgaagaagaagaagattcgtataagacagctcagttatggcatctgcctgaaccgcgaggaatattagtgcaaccgttccgaccagaaccacggaccggtcctctttgcaacgcctgaaacagaagccggatctcatctacgggatctgggaaaggcctcatggcttcaacttgcgtagcgtccaagaaaacaacgaacataacaactaacataactacgaccaccaattgttttttcatcatgtttagaattttagtttttcgaatgagaaacaaaaacaaaattgagcttttttattggtgaatgtagagttttttttgtttttgttttgtatgtgtaataaattcgataatgactcatatatatagggtttttgagatgtcattgtttgacttgtgctagtttggtctcactatcttatgtttatgtatacacacacatacatgaaatttgactttgactttactacaaaagaattcgttttcaacattttgaaccaaatttgaaggattttgaaatataaaattcacttagacacggtttgtccaagtccacacaggcttttgctaaaaatatacaagacctggccctagcagcctcattctaaaccgaattc

SEQ ID NO: 315 - DNA, 55944 bp, Arabidopsis thaliana
atttgaattcatgtttcatctaaagaaagtgtttaatattgaatcattttggtttttgtaacttatacaagagtttctacttgcacagcttggaaaactttacactacatgtgacgccattgttaatgctacaacttaataaattaaatgaatgtgtttaacgacctttaaggaaaaagatgaacaacgcagagttaagcccattaaatcacactttttgcacttgtagcaccaaaaacaaacacattaaaaagaatcaaagagtcttttgcttgttcattttttctcttctttagtttcttagacctgagggtttataggttttggagatctgaagctccattgatttgttcttgggagcatcaagcagcttagccctcttccttgctatagggaactccatggaatgtgacttaggaccattgtccccaaaatcttctttgaacatcttgatgcttagagcattcaacaacgccctcgagtactgcctcgacgccattttccaatccgtccctgatttcatcattgccttaaactcatcaaagcttatccgtccatcctgtcaccacaaaattttcacatcgaaaaagtataagtaccaaatttaccatccaaaacatgatttaagttttgagatggaacaccgtgaaccttgccacgcactcaaccttttttggccctaatttggttcatttaccttgttgaggtcgacgtcaaagaagatatctttgatccactggtcgttaccgttagcgtggcctagcttatcatcgcaaagagctaccttgagctcatctagctcgataaatccgttcccgttcttgtcaaaatacttgaatgcttcctgcaaatgctcatcacatcccattctcttcaaatgtattgagagtgtcacaaactcatcacagctcaacatcccatttccatctgtatccgctgcatccattagcatcttcacatcgccatcgggaacaacttgtccaatcttcttcagtccatctcttagctcctcaaaagtcaagtgaccattcttatcagtgtccattgtttgaaacatctgtactatcgctgctatctcctcgtttggtagattgtccgctacaatctgaaagattgccgtatcagtaacaaggagagagtaaactcataaaatatgggaaatcaagaaacttatatataccctgaggactttcttcttgaacctgttcatcaacaagaattgttgaatcttggtcctgacgttatctccaagattcacatttggtgctctctctgcgttccggatccatggatgttctgtaaaacatagatttttgatcagttgatgtcgtttatttacttaccgtttatcaaacgttattattaaatatataccaagcacttcttggactgtgagtctgctataaggatttgcatcaagcatgttcttaacgagttccttggcttcatgtgagacttttggccatggatctctctcgaaatcgatgttccctctcacaatagcgtgcgcgattccttcctcggtttctgcccaaaagggaggaacaccacaaagcaagatatagagtataacaccagcactccaaacatcgatctcaggaccgtaatttcgtctcaaaacctctggagccatgtagtaaggacttcccacaatctcattgaaccgctgggctgcaatatccattttacagaaaccgaatttttgaagaaaatgatgacacaagattcaaagtttatgatgttataatagagttatgataattaattagtacccggtttgaagaaaatggagagaccaaaatcaatggctttgagttgtgcagtctcagttccattcgaaaagaggaagttctctggtttaagatcacgatgaatcactccatgttcatgacacaccttcacaaaacaacaaacataaagaaccaaacaagaagccaaaaaaccgacacaaaaaaaggagattacaaattttgttttgcaccttgacaacttcaagaatggttttagcaacagatgcagcggcgcgttcagtgtaatgccctctagagacaatgcggtcaaaaagttcacctccttcacaaatctccatgacaagatagacagcgtctttgtcctcaaaagcttccttaaagctaacaatattaggatgttttggtaaacatctcatgatctcaacctctcttctcacatcctccacatctatctccgtccttagcttctccttcgatatcctcttacacgcaaatctgcatgcccgcgcggttacacgaaaatcaaaccgagatcaagagaagaaaagaataaaaacatatcaaaacagaggaaagacctttctcgggtactgatctcgatacattcatgagtgacaccaaattcaccacggcctagttcttttcccaaatcatacttgaggtgaattccatcaccgataggctcggggagaacgcggcttggtggctggaaaatcaatctccgggaaagattagttgaagaatcgaaacgaggaacagaggatgttctgctattactactgtgtcgccttcttaccggtctctttccaaaaggagagcctttcaatggcgacgaaacacaacttcccatgggattctctttttgggttgttttggaataatatccaacggtttgaatcgattaatcgatttataacaatcaatcaagcgatttcaaggaggagattagttcaaatgcaccccatgggaaggaagagagaagctttttgcactcgagttcttttctttctctttttttttttttttttggtttttttgggaggagacttctctcttcttctgatatcttttgtgcttcgttttctatttgttaatctgttgtatgtttgaagaaagagggaaagtcctaaaagagaggagaggagattgagagggaaacaaatattggatggattggagaaatctttctatttttggttaagacaatctgttcgttgttgtgtttttttatatattccgttaactttgttgcccttcctttctgtttcctcctcccgccattttttcacctattgttcataattgttttattttgttaaaaaaattcttaagaaaataactatatttgtaaacaaaagttgaacttataaatccattcgacgatccatagatcaaaacttaatgttaaagttaaagacatggtttcatagtgactagtgagggggtatttttgcttcaagttcacaatgagcattacttgttaagactatacacctacccacatacaccatttgactcatatccaagttcaggggtttgctttcaggataaccatttattttgtttcggaccttgatttggttcaatgcttcattttattttgtgcctctagaacaagtgtttaaatcctgcatatgctgaatcaacacacacaataagtatgtcaaactcaagggaaaactgagttttgtttatttgcataacaaagtgtagtcattacaacaaacttttccaaaaaataaattatatccttgggttccagatgttgattgaaatgaaaaaacaaaagcgggttttaacatcctcgtcttgaaatttcacattgctgagactttattgcagagagtgttcttgcaaacaacctcagaggaactttctgtgtggtctgcctgcatcttcatcttgcatatgctatcaaaaaatgagtttagagtccattagattgaacttagtatattaatcacaataactacacaattgtattggaagtaacacataaaaaaaatttccatctcaatcgtcatagacaaattccactaacaagggatggcatagatcatcaaccacataaacatggtcctaacaagaatctatattcaaggacacagagtagaaactactatggaggaagaatcctcaaggattgtagcaatgaactgctgagagattaagaaccttgaaagtccactatacataatttttcataaccaaatcagctcagactcaaactcagaacaatagaaagcagttaaaaccatttttttagccaaagatccaatttttacaagctaaaagagaactaaatttcttctgccctaactccaatcttagactttcattggtcggtctcgaaaattttgagttataatcaatctgaaatcgaaccatcatcacctaagaatactagtatggaggtgaaaattgaaatccagttccgaatccaatcgttgcagcaaaagaactaatctaattcaaatgcatctacagctaaaattaaaccccaatttcaaatgtatcaaacgatccaattccatacgatacatgaaaaattagggcacaaaacagatatctaactcgggaggattcgaaatgcaaataggatcgagaatgagatagagatagagagatttaaactcacgaaatctttgacgattcccttgtagacaatgatcgggagagcgatgccgaagattccgatgagagcgaagttacgacgagtccagcggaaattgtgctcgagattctctctagcagatccccagtcctcgatgaacttgttcttgttcgtttccattcctccacccatcttcgctttcaccgaatcgtcttcttcttcttctccttcttcaaatggtggttttagctctgtccgcgactgtggttggtcagctcagatcgctatttccatttattgtttttgttgcaataaaccaaatactatcagatttgaagtacttaagcccataagcccatttacgaaaggcccaaagccatttaagaaaggcccaaagttacgtatatgagtattttactatttttgttaaaaaaagattagcttttccaacagtttttgactaaccttttttaaaaaagatctgtatataaatgtttaggaaatagattgtgtttttaatattaacatatgaaacaaaatttaacaaatattgaatataattaaaaatcaaaactgatactttttaaattgacctttaaaaaacttgggtaggattttcattaaaatgcattaagatggctagatttttttaaatattatatttgaagatactaaataattaacttttttttttttttttttcagcaaataattaactttaatgaagtcaaaaattaataattaacttacaaaaaaaaaaaaactgcgagtaattgcacctcttcgtcttcgattctcactctcaacatcttcaatggatatatttcgccgttcaatcgaaaaaggtttcttattgttatttcatgttttgaaagctaggtttggttcttaccaagagctgtttaatttacagattcttctaggaccaatcggtacttaaattttgaattcgagcattttatcaagaaggttctgtttgtttaatggtcaagcttattgactctttctaatcatcatcagaagaaaagaaaaaacttagtgctaggtgtgtcacaatttttcaattaattttttatttgatatattatttgcattacatcaactaatcaagaatgtttaagaattttaaatttcatatatcattttcaagtagttgacattttctaggaatttttcctgcatttgccgtttctggttaatctctaagcacacgcaaatgttgtttattatgttgtgaattgttctgcttataaatcaaaccaaacattgtattttggctctgaagattgaaggagctaaactgaaactgcaatatatatggcttctacaggtggtgggaaagatggatctaaaggttttgtgaagagggttacatcaactttctccattaggaaaaagaagaacacaacaagtgatccaaaactacttcttcctcgatcgaaatcaaccggtgctaactatgaatctatgaggctacctcaggggaaaaaggctcttccagatgttgttacaacaaaagacacaaagagaaccaaatctgcaggtgtttcgccacaaccaagacgtgaaaagattgatgaatccggtaaacagtttatgaaggtgagatgttttgatgacagtgactccatttggttatcttcagattgtgcctctcctacgtctcttttagaggaacgtagattatctgtctcgtttcatttctcagtagacgaaaagatcgtctcgtggttgtccagtgtggctaactcttctctgtctttaaatcaagaatccaccagctcaaacaaagagaatcatcatcaaaaaagttcaaagaacacaaaaacttctttagaaaacgttcgaaaagatggaaaagtttgcaactcatcagctgggaaagctcgtggtactggttctgcaaagccgtctttaccagaaagcaacaacaagacttgtcctcagaaacaatgtgaagagtcatctatttccaacagatttgtgactcttgaagaaaagaaagttagcttctcagtagcaaaaacagagaagtctccttcaccagataactcaactgccactgcgacatcatcattaaagaagagtgcagagattggggtcacaaagagtaagattgttgtggagccacttttttggccatttgagcagaagtttgattggacaccagaggatattttaaagcatttttcaatgtctccgaggagaaagaagtcgctaggatccaagattgcaggtacctctccaagatcaatgagggcacaactccaaacaagaaagctagatctaaaagaagggtgtaagagaaagctcatgttcaacggtcctggatcaaattcaaaaccaacaagaatcccagaactaaacagaacaatcagcaatagcagcaacaatagtagcatgaagaaaaccgagatcagcaagaaccaacaacctataaggaacagtgtgaagagaaacaaaagtttaccgtcgaggttgagaaaatcgagcaaaatatcttcaaaggtggtacctattgaagctgcggaagagagtggagaaatagttaaagagcaaaaaacacctaagaagctcatcatgacccgcaagtccaggacattcttagaagatgactttgctttaatgaatgatttctctatagaaaaggcggtcgggctttgcgagtttaagggaagagaaggcatagattcagatttcaacactgatggtttcttgttcgacgattctctatgaaaagaaaaggctttacaggttcgatacggacgtcatagattcaccaccttctcgcgtcgtcacaacagagataccacctgctcgcgatccgacgacaccaccagcaccaccgccggagtggttaatgagagagatggcgaaggaaaacggctataaccctaggctgatcatgtctaggactctgacgaagaacgatgtaagcaaaaggcaggcatgtctcttgattcttgggaaacttgaaggatcagaatttcttggaagacaaggaagctttattgttggaaacacaatccttgatgactgatgctcgagcggttcgtgagtgtcttttttggatccgctgtaagtgaagtctatttgaaaaaaacggaaaaccacattgatctgtggtgtatatggggttatgttctatttgaaaggagtctttttctctttgttgttttcatatttcataagatcaagctatgcttcaaagcagagggatggattgttcttgtttcaattctgatcatttttttttgctacacctaggaaagatgatttgctgtcttgctaggagcacttgtttcattataactgtcatgagtcgagatgaaatcatgataatcttctaatgtcaaggataaagttataaactattctgctgtatcaaattttttcattagtcatgataaatatgtgccgtgatttactccactccacttgtatatatatatatgttaacctttttttattagtcatgataaatcctgcgccgtgtttaatggaaaaataacgacacgcaaactatatcactttttatatttactttttctaaccctattcttcatatcgttccaaaagaatttgattactgcaacatgaaatcacggcgacagaatgtgtccgtggctcgacaaaccatccttggacgcgacgaaaactttgaaccaatcccaattgatctcgttatcgagatattctcaaggtcgcctgtgaagtctatagcaagatgtcgttgcgtatcaaagctttgggcctccatactccgcctaccctatttcacggagttgtacttgaccaaatcttgtgctcgcccgaggctcttgttcgcctgccaaaaacacagagagttgttcttcttctcgacacctcagcctcataatcctaatgagagctcgtctcctttagctgccagttttcatatgaaaattccctttgatggtcgctttaatattatcagtcctatcggtggccttgtctttgttagatatgaacagatcttaaagggaaggaaaactccagaatttgtctcggcgatatgtaaccctagcacgggacaatccttaaccttaccaaaacctaagacaaggaagaggatttggggtacaagccattttgggtatgatcctattgagaaacaattcaaggtattgtcaatgaatataggtgatggggtctataaagagcattatgttctgacattaggaactgagaacctctcttggagaaggatcgaatgttctataccccatgttcatggttctaaagggatatgcatcaatggtgttttgtattatcgagcaaaggctgacatgttttcaggtactttaatgatagtttgctttgatgttaggtttgagaagttcagctatattaaaatcttgaaacctacaacaactctgattagctacaacggtaaattggcttcactagtgtgggaagggcctagttatatttgtggaaaacgttttgaaatgtgggttttaggagaccccgaaaaacatgaatggttgaagcatacttacgaattgcgtcctcggtggcagaatgtacttggagaggacttgttaatttttgctggaatgactggtacaaatgaaattgtgttgtcgccaaagtatccatctcaccctttctatgttttctactacaatttggagaggaatactatcagaagagttgaaatccaaggaatgggagcgtttaaggttaatgaagattacatctttctagaccatgtagaggatgtgaagcttatataagtgtttaaagacttaataagttgacattttgtcacatagctctcgtttggctcataagtgctcatcataaggatcttaattgaacccttgtcttttttgctgctggttttgtgtactttttttggttattggatataactatttttcttaattagtcttaaagttagtctatgatggttatcatttttccgagaaaccatctatatatcctcttgttcactggttcataaaatgtgaatcaacaacagctgttctaagctaagctaagaaaaaatatctttaaaactcttctctctggggactgagatcctcttaggagcggtcctgaagagagcaacatgaccccatttttattgaaaaaattacagcaaggctctaaaatgtattcagttctaagaaaaaggtacactattcagaaatataatttgttgtttggcccccaaattttctggaccgctaactctaatttcacgtctgactacaggctatactgctatagcaaccgagccactaaaaataaaattgttttaaaacaaacttaaaccaaaacataaaccggagtgtcacttctattctgaaccgtaaatctaccctctaaacccaaaatttcccattttttactggttatgttagattaactggaatctaccttaaataagttttttgatttcaaatttttttctggttatgatcaatttctcaagtaatcagtttttttaagtctcaatattattcgttatcatatccaccagacgtattggaccattgttgtcgaatcgcaaaactaaggtcgagaatgtggctatcaaacttgggagtgtattatattcaccactatgaacaaatggtatggtcttaatactgcacttcgccgtatactcgagggttataacattgcagttccagagagcgctatttgttcgacaaaatgccgaggagatattgatggttgctaatgttggaattgttgtcacaagctgcagagattggtttctttcagtaatagaatggataaagtactctcttttttttttgtcttaggtcattagatcttttaagtagtaaaacagtggcagctgtatcatctagaaacatttttgccagctatcgatgttgctttctgccttaagtaatgttggcttattagttttgtttcttgtttcacttgatcaagtatgcttacactgatcacttgaaattactctcagagatttgttgccacgtgaaagtgaccgttaatctgctacaaacattgttatcggttctttactgatacaggttgctgtggtttatcatgcaacggaaaaggctttgttgcggcttcaactgtatgcatatgatgcacaaaagagaaccgtttctgatgacaatttacgttttggtgctccatgaaggcatcttccgcgtattagggatctcagagggagctaaaattcagctgattgatttttcccaagttctcctcaaaacagaattagttgggtgacaatagccttgagatcaaagttgttctttgttttaccttaccagaaaagaaaccaacgatcatagcatcactgaagaataaactggtcttagccacatggcccacatctacttttagcaaaaccctaattatgatctatgtggtttttgctgtgacttggagtgaactcaatcctctcagaacaacaaatctgttttattagatgtacgtagcaagtgttttctatcattcatgaacagagtacatcgtaagcaaatcttgataaacaaatctggtttgactcaaactcagaatagtacaaaccaaagcagattaaccagttttagctaaaaacccatcaagaatttaagtataggcattctaaacacaatgagagaacaatcattcctcaacgaaattgacttaagcaaactaaacaaaagactatacaagtatgaaaactcatacgtgtcagtcaagaaacaaaataccaaaagtgtaactgaagcatcatcttcactggtagtgaccggaatcacgaatcgagccatcatcgttgaagccaaagtcttcatcttcgtcgggaagatagccttgactgtcttcttgatcaaagaacaggtggtttaactcgtaagactcgtcgaaaaaagagctaggttcaacagaatcttgaggaagattgtcgttgtggccgtcgtgaccagaatcttgaggaagattgccgtcgtgaacagaaacttttgcaggaaccagaacaaaacagagactaccttgctccaaaccgtcaacaacagagtcggcgtggccacccgaaagattgacgccgtcgtgaacagggttcactcctccgcaacggaaaacccagagagagaaaacgtcgcccaccttgaacgttttgtcgttcttatcaaccaccttattccaacctttaacaaaggcatagctcttggtccacttatgtaactcaagcacgtactgttgcgattcaggatctataaaagctactctcaaaccagccgtccgtcgtttcttcatcttttgtgcctctatggttcgtttttcatcttccgttaagaagcctgaattttccatatgcatggaagaaacttggagtcgtgactgtttgtcatcgagatcacacttgaagagagtcttctttggaatgattagttgtggatgatacccattcaatttattcatggatttcagcagtaactccggctgttgcatctctgcagaatctgacattaaatctagagcacagcaaaagagatagaatgatcgtgtttttttcttgcgtttcaagaaattatgtaaagagaagaaagatagaatgagagtgtgatgtatatatatactgtatgttctaactacacccatttagaaaacaatatttactttgaataaactttgaattaattacaggtttcttgacccttttctttatttaaacttgatctccattggaagtatctcaatgagatacccaacaaaaaaaaaataattaaaaaagaaaaagtatgagagaggtgagaaaaagtaggagagaaggagagttaagtttctcggaagagaaactttgagaaactattttcatccaatttggacaggtgtcatcatataattagttcaactattaaataataattaatatatctgttttgattaaaatattaatatattttttttttagaaactttccttatttttattgaggagatggtcttaacatttaaaaaaaaaaaaaaaaaaaaaaacgttttgtggtttcaatttatgggggagaaaacgatttcaattcatataatttgatgaagctttaataataacaatgttgcaaattaatatattttcggcaaaataaaaaacaaatgttgcaatttccttgaatgattcttctggttaacggaggagccgctacttcaatccatcccaacgccgctcgattttatcgaattgggaccatgagtcgccaaattcacggagctgtatcttcttctaagcacatctccttaaaaacccaacaccccctctcagattccaactcaggttcttttctctctctcgctctgtctgttcaaattccttggagattgtgtgttgctattagcgtgactagtatgtttcactagaactagcctatggagcttctgggtcggagactcgagtgtatacccggaaaaaaaggctaaagcaggaaccttttgagcctctggagaaatattccggcaaaggagtcaatacccacaaagtaagtttcctcaattgagcgtttagcattttgtagaactgggttctggagatttatctctcaagtgtgataatttctctaaagtgtgttcttacttggctcagattttgtcttatttgtccaaatgtcttgagttttaagttaatctgactcagccctatgggttgttagtgatcctagtgtttttaaatttgttcgccctgtgcttcagcaaatgagagaaaaccttgattagtgttgccatttgttccatgaccatatatgaccttgtgttagtattttactatttagagtcttatgtgttgcttaatgtaatgtcttccatcttttcatgtctaatgatgcatcagctgtgtggtttacccgatatagaagattttgcttacaaaaagactattggatctccttcatctagtaagtctccttttataaactcacaactttcacattcccaaccattcattaaacttaatatcaatcaccaggttgaaaaaatagccaaagaacctgactactttctaaactagttgcatgatatgttcttgtcacttgaatgtctcaacagatttaatctgaatagaagttggtaggaaaagttctatcatcaagaagattctttaaacggtcaagagatattaattatctagcttttgcaggcaggtcaacggaaactagcatcactgtgacttcagtcaaaacagcaggtatgttatcatgcaccgagtcccttaatgatagggttggtttggtttttactttacagatttcttcacacacagtaacttgttatgtttataatccaggatatccgcctgaaaactgggtcgaagtgctcgagggtattcgtcaaatgagatcttctgaagatgcaccagttgattctatgggatgtgataaagccggaagctttctacctcccacggtataattattttcctcaatttagtgtttaatttttgtgtggaagtatgccatgagatacactgagtttctgctcttttggcttgagcttttttgtttaccgtataaagcacatgtgtccttgagtttcgtataaaatttgatgtagttatagctagtgaatggcttacgaaaggattcttattgtctgctcaagaaagcacctttttctctttgttgttttctcattaaaacaagctatgcttgaaagcagagggatggattgttcttgttttaatattaatcagttttttgctatccctaggaaagaagatttgctgtcttgctaggagcacttctttcaagtcagacaaaagatcaagttaataacggtgagttttgtgctattaagaaacacttatttcacttttctagtttacactcaaatcatctgcatttacaagttcatgattgtacatggatacttactattcagacgctttcaacatgcagcggcaatacatcgtcttcatcaaaacggccttcttactcccgaagcggttgacaaagctgatgaatcaaccataaaagaattgatctatccggtatgttatccaagtgccgtcttacttcttcacgtcattgcctctaacatgagccccttgatgtgctaattttatgccattttctcataaaaaggccttattcttagtaaaatcttggtttaacagtttgcctttactttcaggttggattttatacaaggaaggctacctatatgaagaaaatagctagaatttgtctagtgaaatatgacggagacattccaagctctttggacgacctgctgtctcttccagggattggtcccaagatggcccatctggtaaaattcgactatattattacttatatcttgtgagttttagatgaaatgttttcaaaaagcttctcaaatttctcttctgttctctacatggcagattctgcatatagcatggaatgatgtccaaggcatatgtgtagacacacatgtgcatcgcatttgcaatcgacttggttgggtgtctcgtccaggaaccaaacaggtacctctaaattggcttcaatcagaaatggtattgtgacataccgagcagattgtctccgattctgtttgcctggtctttgtcacccatttgcaatctatgactttctagaaaactacatctccagaggaaacaagagtagctttgcaacaatggcttccaaaggaagaatgggttgccattaacccgcttttggttcgtcattctcgccaattcttctaccttaagacacacataagactatacaaatcccatgatagtattgagtaacatagctgccctccctgatcttcattcttgtcttgtctgacaatcatacacaggtggggtttggacaaatgatttgcacaccaataagaccacgctgcgaagcctgcagtgtcagtaagctttgtcctgctgcattcaaagaaacatcaagcccatcttccaagttgaagaaatctaaccgaagcaaagaaccatgatccgaagtccaagacttttgtattttgagtaaaacaaaaaaaaaaaccattttttgattagtttctctttgcatccaagaaaactgttagagcttcgaggcttgcaatgttgataatgaaaacttgtcgatgtatattaattaggaagcttgcaggtaattaattaattaattttctggtgttaaatcttaagtttttcaatgaaggatgtgaaacgtcagatttttttggttccagaaccacaaaaaaagactcttttttgtcaattgattcgattcaagagttctttcaacgtttggagtagagagagtttgacctatttgaaagtctctgagaccggtgtggcatgacggtcgcggcgggtatcggctacgcgctggtggctttaggaccgtctctttcacttttcgtctccgtcatctccagaaagccctttctcatcctcactgttctctccaggttctttcttttttcacaatcgctctgcttattccggattgttttttttttgtttcccccaaaagctatctatgtgattcaattcgattgcttcgaaatgttgggtatttcgcgaagatttttacctggaaaaaattagggtttttgggagattgattgatttgcttggtaaatgtaatgcagtacgttgctgtggcttgtgagtctgatcatcttgtcgggattatggagaccatttcttcctctcaaagccaatgtgtggtggccttatgctttacttgttatcacctctgtttgtttccaggaaggccttcgctttctcttctggaaggtttacaagtaagtttgttcttcgtcctactgttgttaatttgatgttgttcgtttacggagccaatgtatgtatgatagataggcagattggctgtatagcttgttttgaaacttgttatctctgttgttatactgaaggaggcttgaggatgtcttggattcctttgcggatcgtatctcaaggccccgcctgtttctcactgataagctgcagattgctctaggtacgctttccggtttattttttcgaagatctttagtttgtttcatagattgtatgcggcttttgtgttagtttatattattaggtaggaaaacacacttgtggactcttgctgtctgataagaaacacgaagtaaatgggttgcaagtatcttgatcttggaataggatttagatttgtctaccttgttcttaaagcttagtttcttgttttggaagaaggagaatgctgtagaataggttggataacgatatagttgaaactaatatggaacctagaacccacccagcagctgttatgcatcccgtttcttactatttgacatgatctaagactattccagtcaattgcaagcagctggtggtttaggtcatggtgtggcgcatgctgtattcttttgtttgagcctcttaactccagcgtttggtccagccacattctatgtcgaaagatgttcgaaggtgccattttttctcatctctggtgagtcatttgaacccaaatcttgttcgtacaacatattaagctttgtcacttcttcattaagtcgctagtggtttgatttttgtctagtgcactagtactcatgttataattttacaaccatgtcttacagcaatcattgctcttgcatttgttacgatccacacattctcgatggtcattgctttcgaagggtatgcaaaagggaacaaagtagatcaaataatagttccagtcatacaccttactgctggaatgttggtaagatctcagacttttcaataccacctgtattgtctatatcctttactggttaggataggcttaacagtgatcttttgtttttgttttcttgattcttaccagacattggtgaattttgcatcggaaggttgtgtgatcggggttcctcttctttaccttgtggcatctttgactcttgtgcattgtggaaaaatggtttggcaaaggttgttggaaagccggaaccaaagcagcgcctcacggtaatctggcctcggtctcagaacaacaatagaacagtcgttaatatcattttatctcatgtcttggtttcttgcttgcaaatctcgttcgtctttatctcctaattgcctcgaaacttaaacccttgtgttttaaaacgcacttatgatcctaaattatcaaaaaaaaactgaggaaattttatatcactgaaccaagaaatatttcagaaaatccagtttataactgcgtgacaaactctgttgatcataagaggcggttgcattggtcagttaatttttggtttggcctctttagatctcccgacttgcaaatctcattcaggtcatgtatcccataattgcgtcaaaagtttaaaacttcatgttttgcatgcatttatgatgagaaattatcaaaaacttataaataaataaaaaaaagtcatttatttaacctaaacagataatactcaaagtaacaatacaactagctaggcgttaagccttttgacaataacacgagtaattttaactagttttcgaactttatggtaccagtaagaaaaaggacacgcttgttcatgttctagaatctttgtccattcgtcttgacaatcgagcacagcctcaaagccagcttcagtgagttgggacatttccatacggtccgttaatgactttgactttttctctccaactactcgagccttctgaaaactattaaccgcgatcttgtatttttcctcgcatacagcgacccaattcttctcaaatggttcattatagtttttacgggtatcttcaccgctgataaccaagagtccagtgtcaactataatttgggtccttgatacctggtaagaaggtttcaatcataaataaataaagggtatatttttttgtgtagtgtattagtaaactacaattttttccaaaaatattctagtactttggatgccatttaataatacaagaaatgttgaggttaaaaatttctactattaatccaatccatttatcaatatccctaagtttagaccgttattatccctaagtttatttacattgaaccaaacattttgcttcttctttgtaatatatgtgaccaagctattgtcacatatattacattaaaccaaatatttgatttttaagatatatatatccaatcttctccaagaaaagaaaaaaaaataaaatagaaattaccaaaattaaattaaaacaaaactcagctctatatcaaaatttattgtgtagggtactattttcttgattgataaaattttaatagtcctgtaattaatttaatgaaaaatgattttctaaaatattattaacttgtcgatttatttatatattatatgttaaatatgcatggatcgaagtagaggaaatatttgcatcttctaatctaatatttgcgatttgtttaacatttacttttgattggttacaattattcagttttcttaattaaatctaagttacgttagatcatcaatattacgaaaattctttttattcctagtttctaccacatggatttctgcataattaatataaaaaaaaaacgaaaattgttacattagtaactatctaacgtaccgcgattaaaaatatgtcatagaagtcgcgtgcggctactatacgtttgtccgacccaatgtttttcatgcagaaatctacttcagacgactccttgcaaagactgtatacgtctttggttggcattgcatttgattttggaaatgcaaaaagcactaataataacgacgaaagaaaatttatgtgtttttttagcatcgtggccatattgagacacaaattaaacgtgtatcttttttatttaaaaaaaaatctgtgtttcaaagatcttatttatagttagattgaaagttaaaaacggtaataattgtctatggatgagattccttaaatatttgaatggtagcacagtaaaatagtaacaataattaatggaattaaatcaacctggtttaagaatacttttggagatattcaccaaaaaaaaaaaaacatttttggagggaatatgagtctccgactgaaatcagcgattcttatttgagtctttaattgtccaaggctttggcgcatatatatcttggaggaacatatatatataacaaacatcgacatagactttaggagtgaacaagagtgactatagcattagaaatcttaaatgatagtttttttaataataaaaacaaatcttaaaatgtgtgtttagaaccaaaaaaaaacttataatttggaataaaaggagtaacaaacttcagtagagagtgaagacttttacgagagaacgttaatgaatttggcatactttcacaaacgaaacgtccttttcacaaaaggtcacttgtgtcgtggccatgaaattccggtacaattaggtcacaagcttgttgaaaataagaagaatgattccagaaagcttgaaaacattcatgttatagaaagtgagaggagacgtttgtatcggaccatcccttctccatacgttttcgcagtcgatcacagcgttggtgccaatccttgccagtttttccacgtcccaaaacgatttttgaagtccaagttcccaagctgtgtgaaaccttgccgaagcaattccgtaattcgtcttgcaaacctcgatccgtctcctcccatgaggaccattgaactttcgacggactctatcaatatgagtggttgcgtcatccacttgcatttttgactgcgttatctgataaagtttccaacataaacaagattaagtacactcgaataaaattgcaatatatgtataaaattcataacattaccgcaattaaaagcacgtcagtgaggtcacgtgcggctggtatacgtggatctgtcccaaggtatttgaggcagaagggcacatcagttgtctctttgcataacttgtcaatgtctctggctggaatcgcgtttgctactggaaacacgactattaacaacgacgtaaggaaaagcatgtggtttattagcattgtggccattttgagaaacaagaagtgttttcttgtgtttttttcttagccctgttaagcgttattctttcttacaagaaactttataaccttaatgtattagaattttcttattcttttgtgctaaacttttccaaaactttagcaccatatttatactaaataggttgtggctatacaataagccaatttcctattctcgtactaatagcaatagataatttcctttttttatggataggaaattgtcctctgtcttcatgctttcttttcctcatatataaaaaaggaaactcttgataatgtatggaagagaatctcttcaagagattccttactaaatctagaatactctatatttgcatcatgcatctccaaaaagacatcatagacaactatttttgctttcgaatttgtgctaatttagcatacatctttagcatttttccggacttagtttttgcttgaaactctcattcaggtgtataccacaaattgcgtcgaaactcgagattttaaaacgtcatgtttttcacggaatgatgataaattatcaaaaacatcacaaaggttttattcatttaaaccaataaatacatatagtttcaaaaatcgggtttacaactagaagcagagaacaatcggtgttaataaacgtgtgagtgaataagctaaaccagttaatatcgtaaataaatcaaattccaatacgacgtacttaagcctaaagcttgctgataataagacgagtaatttggcatagtttcagaacgttatggtaatagaaagtgagaggagactcttgtttcggaccatgctttgcccattcgtcttcgcactcgcacacagcatcaaagccagcttgcgtgtttcgggttatttccatatggtccgtcgatgaatttgactttttctgtccgacttcccaagccttgtgaaaactagtgcccgcgctctcgtatttttcctcgcatagagcgatccgattctttccaagcgtgtcattaaacctttggcggatattgttgatttgtgtgattgcattggtcacttgaatttgagtctcagatatctgataagaaggtctcaatcacaaaccaaaaataatacttcttttgtagaatatgaataaaccacagatttctataacttctatttagtattttggaggccatgtaatcttacaagaactggtgtggtgaaaattttcaactaatctatactattatccctaattttaccaacactgaacaaatatcttgccttttttggtaatatatgtgatcaactaatctgacatatcactaatcaaaattgtcacattaaataacgttaccggaattaaaagcatgtcactgaagtcgcgtgcggctacgagacgttggtccgacccaatgtatttcatgcagaattctacttcaaacgtttccttgcaaaaattatgtacgtctgagattggcattgcatttgacattgagaatacaaagagcactaaagataacaacagttgaagaaacttcatgtgtgttattgtcattttggccatattgtgaacaaagaaggtctttcttaattaattttgtttccgttgttgtgtttcaaacattttatttatagttaaattcaaagctaaaataggtgatgataatatacggatgagaatgagattcctgaaatttttaggaaagtcaaagactttgaacggtagttcatcaaaatagtaattaacaatcattaataaccatgaaaatactaatggcagtttaatgtttcggtttccactagaccattccattatctcctaattttaatttttgtacacaaaactttttttctcttgggtcatggatgacaaaagataaacatgttttgctttgggaaataaagaaactaatctttcacaaaaaaataaaattcatcaagataaacaaataaactaatccaatttttttttacttttggaaactaaaacctatttatgttaggggaaaaataaatgaaataaaacaaaaatttgattaaaaaacgttaattaactggatttcacctaattattaaaattaaaaattaaaatagtgagaactaaaataaaaatttatcactagaaaattattaaaataagaatttattactagaatatatatatatatatatatatataacttatttaaggaagattgggaaaaaaacaagagcaaatccttagtaagaacgtaattaaaaattctgttatataatattctctatctctctcttaagcttgttattaaacctcttccttaatttcttgtagttctctggccgcacaatggaggcttatgatatttgtaagttttggaagctggatatgttggaagaattttctcaaatagttctcaaaggaaaaaagaaaatcatcctcgacatcccgagcccctctcagcagaacaaaagcgacatcgtttcgttatgtcctgctgatagtcccgaaacatgcaattcttcgataccagactggctcgtgaaagtgatgagaaaagagaatggatacgatccaaagctgatcataaagaggagggtgctgtgtacgactgatctccgtaaaaaccaggggtgtctctcaatgcatctcagcaaattagagaagtcagattttttgacagaggacgaaaccagattcttagatgaagactttttaaaggctaaaagggatggtttgaaagtgtttttggtggatcctgaatcggataagcatgtcgtttatttaaagaagtggaatggtaatacagtttggaaatatgtgttaagtcatggttggaacaatgtgattgataaaaaaatcttcaaagtcaatgacgtgattgaaatctggtcctttcgagatggaagtggaaaactttgctttgctctctcttctccaacccgttgtggtagaagcagctctggtcattcctcataatgtcacaatgttgcttgagacccaagtaactttaggaatttgtttttcattattttttatggtttattgatttttttttgtagagagattggatattttctcccttgagtcaactagagaggttggatgtttgtccaatgaccttatttttctgaatttatttatttattttaaattgacttggtaataatgtagatttattaacaatttttttctaaaagattactttggatttattgttgcggtactaacttgtgttaatagcttgaatcaatattttatcacgaacatggatttattcccaattctatccaaattcacaacctaaaagatttgatttggttttctacaatttaaaagagaaggtgtttgcactaaaacagagtaattgatgaatcacataatttccggttcggttcggttataattatgtggtcggctaaaaaaccggaattttaaccctgtctccatcctcactcatataaatagtcgagaaaccctaaatttctgccaaaacctcacagccacacaaagaagagaagaaatggcttgcaccgtagatttccggtgccttgacgaaggattcggcggcaaaacctacaaacgcaaacgcgaatctcaagaacaagccgccgccgaagcaatcgccgatgaagcttccatggacatcgatggtgctcctcctgccgcgaaacgtagcgccgtcgcttcctctgaaaatccagacaaacctattgctctagctgtcgagagaccaacctacgacggtgtaatcgccgggaaagtctccggacggaactggaaacagccgcgaactcatagatcttcagggaggtttgtgaagaacaggaaaccagatctggaggagatgaagaggcaaagggagattaagaaagcgtataaggagagggtgaatgagctgaaggaagagattaggagtaataaggttgagaagaggaagaagaaggaagagagagagaagcggaagaaggagaatgttttgagaactggtactaagttgcagaagattacaaatcccaagactttgaagaaaatttctatgtctaagaagcagaggaagcagcttaagaaaattcctgacgagatgttgagtggtggtagcaagaagagtatcacgaattagtggttttttgttccttctctttaaaggcaagtgttttcagttttttgtatttcctcatgaggtttattcgatgttgtttagttaacaatctgcagctaagaactaaatgttatgaaagtttaatagtgagaaactgtgttttgcttcaacagataagaacccatcttttgtttgcagtttcaatttcactccattgagaaattggattttgattatcattgtgtaattgacttgaatctgtcgcacattagttatatgtagtgtgtccattgctatatctggctctgcttcttgataaggatcttggtgtttgactttgattaatggtttcatttcgatagctatgttctgatatgttctcaataaagtgacaaccatataaagggttgatcccatgagtttgttctccgttcctcttgtttgaaatgcggtgattttagctgttcttaggagtatttcaattgtagtcctatcctgtgaaagttctttgtaatgtcttgaattttgattatgattgtgttgaatttatcacgccttagttatatgtagttgttcattgctatttctggctctccctcttgataaggatcttggtgtttctctaatgctgcctcttgctgtttggtgcgatatagataggcattcgggtctgaaatctaacctatacattgacttcgatcttcgatttatggtttcatttcaatagcttttctcgggttttagttttactgaaatataacaattgaatgatcccatgagttttgcttgttgtgtgatgtgttctcggttccttttgtttgtaatttcaattgtatttatgtcttgtgaaagagctttataatggtttaattggatgagagacaaataatatacattctctatggcagccagtaactgttgatcttatattacacatgtaagataatgttggaccagaaatgtcaacatctttcgagaagttttgtgtggcagtaattcagatatatgttcactctgtgacgcaagcgtttaatatcttggcactgaaatcgttgtcggaatactgagagtttgacatctggaacattaggattcctttggagttcgaaaattctggttcctacatttatataaaaacaagacagtgatatcagagtttttagattgtttcagctttctacattacttttttgctatattaggtggaacaatgactcgtgcaacatccaaatgttctttctactcgtcaataggtaggtggttgattacataatttggtgagagttggtcgcataaagcttaaccaataccatatctttccccagatctcctctcagaaagtctgataaacaaattatttaacagaacagatacacaattggaaaacaaatatgtgacaattattgcaaaaacaaataagaatgaaagaaacagacgaaagttaagtaaccatgactttagtgaaattaatcaatttcgtaagcaaaataataaaaaatcatttttctaggaagcagaggaggagagtcctaccaattcatcttctctctctctctatcggctcatatctccaaaagacctatccaaaaaaaaaaagtttgagtctttacgaattccaaagaagcaatgaaaaaccctatccatatgtagctcttttcgattccgtaatcaccacaaactcttcctttcaatggcgtcaacgccgcctcactgggtcaccaccaccaacaaccaccgtccatggcttcctcagcgtcctcgtcccggtcgctccgttacctcagctcctccctcttcttcagcctctgtttcttcagctcatctttcacagactactccaaatttctctcctttgcaaacccccaaatcagatttctccggtcgtcaatctacccgattcgtctcccccgccaccaataaccaccgtcagaccaggcaaaacccaaactacaaccaccgtccgtatggtgcctcttcttctcctcgtggctcagctcctccgccttcatctgtagctactgtagctccagctcaactatcacaacctcctaacttttcgcctctccaaaccccaaaatccgatctttcatcggatttttcaggtagacgatcgactagattcgtctccaagatgcatttcgggcggcagaagacgacaatggctacgagacatagctctgctgctgaagatgcacttcaaaacgctattgatttctctggagacgatgagatgtttcatagtctaatgttgagctttgagtcaaagctgtgtggctctgacgactgtacctatataatccgtgagttagggaatcgtaatgagtgcgataaagctgttggcttttatgagtttgcggttaaacgagagaggagaaagaacgagcaggggaagttagctagtgctatgataagtactcttggtagatatggtaaagtaactattgctaagaggattttcgaaactgcttttgctggtggatatggaaacacggtttacgccttctcggctttgatcagcgcttatgggagaagtgggctacatgaggaagccattagtgtcttcaactccatgaaagagtatggcttgaggccgaatttggttacctacaatgctgtgattgacgcttgcggtaaaggcgggatggagtttaagcaagtagccaagtttttcgatgagatgcagaggaacggtgtgcagccagatagaataactttcaactcgttgcttgctgtttgcagtagaggagggttgtgggaagcagcaaggaatctgtttgatgagatgacgaatagaaggattgagcaagatgttttttcttataatacgcttttggatgcaatttgcaaaggtgggcagatggaccttgctttcgaaatccttgctcagatgccagttaagagaatcatgcctaatgttgtaagttatagcaccgttattgatgggtttgcaaaagccggaagatttgatgaagctcttaacttgtttggtgaaatgagatatcttggtattgcattagatagagtttcttacaatacattgctttcaatctacactaaagttggtagatctgaagaagctttggatattctgagagaaatggcatctgttgggattaaaaaggatgttgtgacttataatgctcttcttggaggatatgggaaacaagggaaatatgatgaagtgaagaaagttttcactgagatgaagcgagagcatgtgttgcctaacttactgacttattcaactttgatcgatgggtactcgaaggggggtttgtataaagaggcaatggagatatttagggagtttaagagcgccggattaagagctgatgttgttttgtacagtgcattgattgatgcattgtgcaagaatgggttggtgggttctgctgtttctttgatcgatgagatgacaaaggaaggaattagtcctaatgttgtaacttataattccataatcgatgcctttggtcgttctgcaactatggacagatcagccgattatagcaatggtggatctttgcctttctcttcttctgctctgagtgcattgactgaaacagagggtaatcgggtaatacagttatttgggcagttaacaactgagagtaacaaccgaacgacgaaagattgtgaggagggtatgcaggagctctcctgtatattggaagttttccgcaaaatgcatcagctggaaattaaaccaaatgttgtaaccttttcagcgattctgaatgcttgcaggtttgtttctcctttggatcctctttttgaagttaacgagtgaaagatatgaccaaatagtttgggttttcctagattagctctatgtggttttgctgtttgactccattttctgtgggatacttattttgcttacacgtttgtatctatgtagtcggtgtaactcatttgaagatgcatcaatgctactagaggagctcaggctgtttgataataaggtatatggtgttgttcatggacttctcatgggccagagagagaatgtatggctccaagctcagagcttatttgacaaagtaaatgaaatggatggttcgactgcttctgccttctacaatgccctaactgacatgctttggcactttggccaggtaaaataacactgatattgtagaggccaaattttgtaaccgttttttaatgcgttactattagtacaaaggcttacttttgggaaccttctgctatagaaacgaggtgcagaactggtggcacttgagggaagatctaggcaagtttgggaaaacgtgtggtctgattcttgcttggacttacacctcatgtcttctggagctgcacgtgcaatggtccatgcgtggctactaaacatacgctccattgtctatgaaggtcatgagttacctaaagtcttgaggtaagctacaaagagctcttcggtttaactatcaacttaaaccggcctataatacccggctcttttccttttatggttgcttcctaaaactccatcagggcccgagaattaagtccaatctcttcttttccgaaatctgatatgcagcatgtccttgatgatgctatgttttcttgtgataggttgaagtttttggtcatacactatgattatagtgtctctgtagatactttgcttatgtgatgtggtcatgtttcgcaaatcttttgtgatcccctcaacttttatcactatctgggttagttcaaaacttgttaataactttttcttattgtggcagtatattgactggctgggggaaacacagcaaagtggttggagacggagcactaagacgagcggttgaagttcttttgaggggaatggatgcaccattccacctgtcaaaatgcaacatgggacggttcacatcaagcggttcggtggtagcaacttggctgcgtgaatcagccacactgaaactcttaatcctccatgaccacataacaaccgccacagctactactacaacaatgaaatcaacagaccaacaacaacggaaacagacgtcgtttgctttacagcctcttcttttgtagcttagtgtatgatgtaaaagtaaaacaatttgtgttgatcattaaagtgtataggaccaatggtcctaacaatgtttggctctgtgctaatatttgtaacaaagcaactcgattgattatgtgaaaatcgttttgtctttttcttttcttaaagatatgtaagaataaatattttaaagcaaatctcgagatttattagaaacaaaaaaggattatttacattaaacagagaaaatctctattgacattggccgtttcgtgatccgttgctggttttatggaaactaaacagaggaatccacaggttttcgaaagtaaaccagtttgattataaatagttcaacttgtcaacaacaccccagtgacgcttcagttacttatttaacgtgattttttcacccgtcggtaaaaaaataaatatcattcttgactttactttatttctatgttagatgacacatatttatttcattactttcttaccaaaaggcaaaacccacaatcgagttaaacttccactgtaatggacctaatggttgcaattgtctatccacacacatctactacgtttctcactagaacaatcacctacaaatttcatggtaaattcttctatacagttaaaagtaaaacactcgaataaatattttccataacacgtgagagtatcttgttggtgttttgtcattatcctcttaacctgacaccaaatttgtagtaagtttattttttacgcaacatattattgactactatattcatacacgatttttttattttatttttcggatcaaatcaaatactcaggcaaaggtcgaaaaacgttaaaagattttttcattttattaaaaaaaccacagaaactcatggttttttttacgagatatatttgtatcttatataataaaatacgttaataatatatcagtagcaagcctttgtacaccagtcccatcgttctctatataaaccattcttctccttcctctcatttttatgtattcttctccttgtccttccttactctctatatttttctcaattctccgatttgatccaacgatttcacagatctctgatctaaatggcatccaacggtgataaaggactgatcgttagcttcggcgagatgctaatcgatttcgtccctaccgaatcaggcgtctctctcgccgaagctcctggattcctcaaagctccaggcggtgctcccgctaacgtcgcaatcgctgtttctcgtctcggtggacgatctgctttcgtcggaaaacttggagacgacgagttcggtcatatgttggctgggattttgaggaagaacggtgttgatgatcaggggattaacttcgatactggagctagaactgctttagctttcgttacgttacgtgctgatggagatcgtgagtttatgttttaccgcaatcctagcgccgatatgcttcttcgtcctgatgaactcaatctcgacctcatcagatccgtacgttttaaatctctctctcttcgctatagatttttacgattttgggattgtagaaagccagatctagaggatttttagtttaaattttctgggaaacgcagaaacgaaattcgattaggagtgttagttattgggaatcgcgttattgaatttagaaaacgtagaagatgatctcactcactggcggtgacttttctcttagatcttttttattttcgcgggtcttatttagatccacgtgataccacgtgatttctccaatttcttcatctttcagtttttacccaaaacaacttcaaattaaaaggctataacctttttggccgtgtagttaaccatcaccatcttagctcaattctagtgacatgtttcccttgagtagtttttttactgagcttaatatgtgttcttcttattgatctatattaaagtcttgagtatttttaggtttatgatgtgaatatgtgattaaaagtaaatgtgcacatatacgtgtaaagtttggttttttatagcaatggtgtgaaatgatgccaggttgagtatttttgtgtacatttacctttacagctaatttcatggcgaggatcttttgcttttcttgtatagtttgataatgattgacccttgtcgtagttaatattcaaaacataaaccacaattgggtcccttgacaattatattccttatgatctaagttgtgttattttgtgagttgtttttggtaccaaccttggttttgtttttttctgttattttgacgtttttgtgtcccatgatgtggtgtgtttttgtgtaggcgaaagtgtttcactatggatcaataagtttgatagtggagccgtgtaggtcagctcatttgaaggccatggaagtggcgaaagaagcaggagctcttctttcctatgacccaaacctcagggagcctctgtggccatcaaaagaagaagccaaaacacagatcatgagcatttgggacaaagctgagatcatcaaggtgagcgatgttgagcttgagtttctaactggaagcaacaagattgatgatgagaccgcgttgaccttgtggcatcccaacttgaagctgttgttagtcactcttggtgaaaagggctgtcggtattacaccaaggtaacaaacacacttgaatatttttatgcatttaccgtcatcattcatcattatcaccattattatcagtatcatcagcatagttgtctcttggttatgctttgtttgttgtgtccattaggtgataccagaaggcaaaactagtgtgttatagaatatagtttcaggattgcttttatgttaacatctttttaaaataggattctcgagatacacaaggtatttgaatactgctgctggaatcaattcttcaactttgattaaattattagtgggttttttagtaggtttggtagatctcaccaactgatgaataagaaatttaatattagccgtggaccctccaaaagattaatactattctaatcaattaaggggtacagcaaaagtcgtgatctctaaggttcttggtttaatcaaacatgacaaatgttaatgtcaagaaaggggagttacttttgcttttctcatttgccgaatcacatgctattttttttacttctttacggcagttactctgtgaccttccacaaaaatatgtttctcttcttatatgttcttaccaaattgtgtagactttcaaaggagccgttgaccctttccatgtgaacgctgtggacacaaccggagctggagattcctttgtcggtgctcttctaaaccagattgtcgatgatcgatccgttctcgaggtatgatattcgaaagaagcatccaattaatcaatgtgcattcattggatgaatctttcttagctacaagatatatatataggttctaacttcaatatctaatgacttgttgggtttatttgaacaggacgaagagagattgaggaaagtgctgagattcgcaaatgcttgtggagcaatcacaacgaccaaaaaaggagccattccagctcttccctcagatgctgaagttcggagctttctcgaaaagaaatagaaacaaaacaactcaagcttctattacgtaatctgtttccgcgattatcttctctttttgtattcttgttttcggatggttgaatcgagaagagaaacaaattcggcattccgctctgtttttgtttctcttcttcaaatgtaatgatttagaaaagacgtatgttgcaatttaaggcttcacttgctaataaaatgataaggtttttccaagttttagcctgctacttacagtgatacacatatcagatcatggagaaagcaaggcgaagagccgaagactatgcgaatcaagtgctatatattataaagcttagtagattcatccatagtttagcctaggtcggggactaggaagtgctcttcttcatcatcataccggtactcaagcctctgcttcttgttgggtacattggacttcataggtctgttgtaggaatgagcatgagccaaatgtgaaaaggaaagctcgggaacttcggctaccggtagagcctcttgatcaggctggtcaccaaacagacccatctctgcaagccaatccagctccccgagatcgagttgctctttctcctaatgtacaacaagtgatttatatagttgtcaaaacaagttacaaaccaggatatttgagtattcatcagtttggtaaaccagttctcaccttattactgcagtcaagatcagagtagctgaagaattcatcggtagcccacaaaggagatggagcagcgggttgctgagttggcggtttagagagactctgctgattagatgggtcaaagtgattcttttccacttcttgattgcaactagtggaactaagagcaactcggattccagtggctaagaacctctggtgattagcagagcgagtatttggcgcatgggtcgcctcatcgcaatctctgcagagcagagccctatcctctacacagaatatgaaagctgccttctcctgcaagtcaacaaagatgaacacaagaaagagatttactacataagcaactttgagcatgtttttcttgagatcccattaagaatatctaccaaagttggatctacatatccaaccttagcaaactaaaaacatccaaaaacaaacaaatttcctgagatcccactaaaacctttactaaacttaaatctaaaaccttaatctatgttataaagctaagaacttctcgataattatacttaaagaatctaccaagaacagctcaatcaaaagataccctcaaaacaaataaagatctctgcagatacgaatagagacaaaagagagaagaggaggtattcttacaaggcagatgtcgcagggagggaatttagttgagagagagtcaagaaaaaggcgttggtgtttgctagcgagtttattagcagcatgaacctcaacgtcacatttagcgcagagagcagcttcatcagcacaacatataagcgtggccggagctttctcacacacatcacattgtatcttcatatttctcaaaaaaaaacagaaattttctttagggttttcctgagaagtaagaatctgaatatcagaggaatctacaaaacaggagttatcagccttttgtttctttcccttgttcaagaacagaacctttttataagacaaatgacttgagagacaaaagcagttttgtttctgtgtattcaagttgaggagaagagaagaagataagaagggctttatgagattttaagaggattttgggaatcaaaaggaaccacatccttgcttcttacatcaatgccttgtaggtcctcatttcttcaacttctgcggctctcgttgtttctcttcttctctgtctttttcacttttattttgatattattgtaaagcgatcttatggaaactgaaaagactattaatgttttctttttcgtgagtctgtatacagtgtagccgtaaaatcttgtggacaatgttgcacaacaatttcgtcggctgaaatgtttttgcggtctgtattacacattggaggagacattaattttctttaacatcaatacaagtttgttggcatttgtgtggactaatcttgacatcttgtggccttccttctttcttttagagaataaagtcagtatttaattccctgaaaaatgatttggatatataccaaaaccaatagtgaacaaatatcataacacaaagtaggtttgtatcttaaaacacaattgttataagattataacaaattaacagcttttgaacgtgattatatttttacatactatggtttcgagactcagtctctatatcaaatccaaacaactaataattgcagtgcattgcatatttgcaatgcacggaactctgtttctttgggcttacccaaatgtttatcttcaatgaccttaccaaaaggtttcttctacgtaccaaaacgccaataccctgtaggccaaggcacccgttaagctgtgttagctaaaaccctaaaatccaagagactgcaagtgatggatgaacaacaatttatgaatgagaaaggaattgttcagaaggagaacctctcacttacgtgggacatattcatattcctcagttctctttctgggcttgtgaaggcttgagtcttactccattttgttgttcttgctgttgaagccgctgctgcataagctgttgcatctgttgctgttgaaactgatactgttgctgttgctgctgctgctgttggtgttgctgttgttgttgttgttgttgttgttgctgcttctgtgaatgaatctgaagttgctggaactgttttgcagctaagattgtttgcattgactgattgttggaatagaattgctgctggtttgatccaaacgacccatagttcaacgctgatggagcaacttggccagtcaacaccttcagatgctggatttcctcctttagtgcttcgtttagttctgttaatagagaagattcaattcgatgatatgaaccaactatagcagtcttggcacagagggatattgtttgtgataaaagagagactcaccatcctgcaagtgaacctgctgctccattgtttgtaaccgcagcttcagctcattgttttcaacagtcaagccatttgtgtctctctatacaaacaggaagaaaagagcacaagttttcaacccataaaaaatcacaatgcacgaacaaacgttgtaaggctagatttagtttcatttagcatgaagaaagaacaaccgtacaatgagtcaaaactaacctgtaagagggtcaactgggctgagagagttgtagcctctgtttgcaaagtctgtacttttctctcaagctcaaatatgtatctcgtcttcctttcttttgatcgtgctgcggactgcctgtttgcccatatcctattgtatgaaacaaaaacaaattatacacttgctccactcattaaaaagctgaagttatgtgggaacagctgaagcaactaaatgactggtggcattaaggttcaaaccaaaagcacacaaatagtcaccgtgtccatccacactataaacaggatttaagaaaccagagaatcacagaagaaaaacgaaaaccaattacctcttagcacgtttaggatcaatgagagcaagctcagcaagtttagtagcagacatagacttcttagcatcaatagcagaatcatcttcatttcccgacataagcatctcattgatattcattgaaccatccatagattggctatgttgatgcctgattcttggcctttcgccaagactattaaccgtattctgaggattggaagttgagcctgtgcctgtctgcatcattgtctcatttttccaagcagttcctgatggctcaccaacttgggcagaagatgtagcagaagaattaaacttatccatatcaagatacatagagagcaaatcttcttcagtctcatcagagaaagaagctccatcagcagcattaccaaccacaccaagatcactatcaaagctcaaatcatcagggagagtaagtatttcagaatgagctcgccgatgtccaatcttcttaggtgggttatcaagcatacggctaatatcatgactcattcgattagcatctgaaccatgaccaatgggaccagcttctgagaatgcagagcatcgacctgatggagatggaggaggaagacctccacaaggaggtgctggagatttctccttatccatttctactgacttatcaccaaatcaacgaccctgcaaacgattattacacataagaatagtaagttggcaaattaaagctagcaactttctccatggaatagaaacagtgaagcaactatagaaaaaggagaagtttttaatcctaaccctgaatcaaagtagatcaaaggagacgactttgaaagacccacttacgaaatagatctaaatcagctgtagtgtgaatctgcagatatagagagagagatccaggaggaaaaaaatgtaagatttttccggttaaagttaaatgcttttggacaaagtagagattagagaaggaaatttagtaagggagaaggaaatgagaggaagagaagagagagatctaggtaggagatgagatgagggaaggagagaattcgattcttacaacagatcatcatcatggatgagtaggtaatatgctcttaaaacgcgtcgttttgcgtgttccgccatttccgtgactgtgacgatgagattgcagaagagatttttgaagaattaatttatgtcaacttgttaccaatcaggccaaggccttttcttagacaacaatttatgggcctaaagcccattaaacctaagccaatttatgggcctactacatctttttttcttttgttggattagtatagtattaaatgtctactgatcacaaaaatacttgtataatattaaatccaatgtgtgatcttatgattttatattaattaaacattattgtctatcggatgaaaaaaaaaaaaaaaaacattactgtctatcttcttttattacatatctctgtttaataatatcccctatattatttgaaactttatcttaaagtttaatttttctaaattattttaattgactttttatgatagcaacagataaatcaattatgattgtgatttgttatgatcgaagcaaagcaagatgtatattttattttatttttggtttgtaaatgtatcatgtaaacaaataaatatcagtttttcttttttcataacgtggaaaatatataattaatatgaaaaatgagatattatctgtttaggacaaagatattatttgaacagatttaaacaaaaaatgaaataattttctcttctttttttgtgtgccattaaataatttttccctataaaaataataataattggtgatggtaccacatgttgtatctgcgaagcatcattgtccttttcctagttggaaaggaatgttacggtggtcgatttcacaattaataatctgaaaaacgttttgaagtgattgatatattaacttctgatgtccctataaaaatcaatattatctgtagtggtgtcctcctatattcctatcatatcatacatttgcaatcaatttcatctggcgatagcattaaagtcacttggttcaatggtcaggtttcacacatttcctcgtactttgatattactcgtctttaatagaggtagttctttgtatttatcgtgtgtgatgaattgattgagtctgtcaaagtttcataagctaaagctacctagctaagttaagggattcttttggacggttttagacgtaaactctgattagtaatcatacagggcaaaataacattatcagttagacagtatatctgtatatagtgtgtaatgtatactaaagttttgaaatggttaagtctcagtgtatttctattatattccttaaaatatgatttgtccggaaacatttgatgagattaagtaggagttttaaccacctaatgtagttaagtaatgcattacattgtgatgaatgtgaaaagtttataagttagggaggaatatgttatattgagagagtatatttgatcactagtagtcagtgacttctgacaagctactactcaaatggcgatcagggaccattagcatcatttaactattttttatctctgcacacatgttacgatcatttttgttttagaatatatgttatatatatatatatatatatatattaagaattccaatattgtaatgtagaagaagttctgatacatgtaatattattttcaaatcaaatcacgactagttttaagaatactaaactcagcaactatgtatttagtccgttttcaggaaagaaaactacgtgacaacattatgacttcttttccagttttagttggactcaaaataccaaacacaaacctatattctcattgaaacaacagaaccaagtcggaaaaaatactattcttctcaaaacacggaagtgattttctaatgttttcttgaccaatgcaatgtagtactcaattttttttccaaaaaattaaacgtcataaaatcttgggtttagaaatatggtaatataatgacgattaccctcccaacaccatatatttacctgctccaaaatcctagtacccaaaattttaatgtggttaagagttcagatcgtaataaaatgttttgttgagtgttaacatcttcttgttaattgatatccaccataactttattaatgcattacgtatgaatcggtcattaggtttaatgcttgttaatcgttattaacaaagcgcaactacctttctcactttaggctttcttacttaaccacaacctaacaaatttctaactaacgcaatccatacctttaatgctaatgttttgatttagaaactactaaggtaagtgggtacaatacaaattgggaaaaaagaatttttataatcaacaatattagtgatggtagaattagatatatccattttgagatggaatatccgtttcattacgtatgcatcccaaatttcattttcaaagttttggtagtaatcaatgaaattagctctcctaatttaaaacctaggacattttgttatccaaattagtgagaatattggtagtgatcaattaattttgctctcttaatttttaaacgtattttgttattatttagattatctgttcccgatctttactctgtttttttttcgttatgatatgaagctgcttacctataatgaaagtaacttcactatgtctactattcttgtagggcactttcaattcttgtactcatattattttaattttcatattttttgtcgtcttacgtttccggagttcgcgaggctcttttttttttttttcctcgcgaggctctctcatcgccactatagtgttttgaataactaaagttttctttttcaagatctagaaaaccgaggatctaggaaattctgggacatttattcagatgtgatgatttagtaagttgtttgtttatttttattttatacatataagaaagtggctgatcacttacagtcacaacaagattgtttgaattgtctatacgaaattacaagttagagcacatgcttatgtctacgtatcggatcttaacatgtgaaagtttacgatcttatatttgtcttttgatccaacatattctttatatcattagaggtatggtttcaaattaagttttagttacttaaagcattaaatgtgtgtgggcaacatggcattaggccccaaagtttataaaaatatcgctcatcataatatttttttaaacaaagatacttgaatatttgagatttgagagcgatatcattatagggtgcataagaagatatcatcatatcgtacactgaataattaaatatattatttcatagtcagatttttttcgagtaatgtactttagtgtttaaagtaatagtaatagagacgtgtatgcatcgatgatcaatcttgcaaccctaaaatgattagtttaagaggaaaaaagcctaagaatacatgtactctagtacttgatatctaaactttaaacgaattgataaaatactgtacggcttttatttaaacctcaaatttgactattcattattcaaataatattacacaaatacatacgaacgtaatacctaacctaatgaaaaatatttacatataccccaaaaatttagaaatgatagtcaagaaatacaagaactctagaaaaatacatacattttctatttatttgttcatttacattcttaatttttacaaagatccaaatgctatatatttttcttcggtctacaaatcttgtttagacaaatccgtaccccaccggaaatgaatcatatctattaaaaccggaaaaacggtctatttccccacaagaaataccgcatcatgccagatagagcccaaacttcaaccccggtctacatgtccatgaaaacaaagttttaaacctatttctctccgaaacgtaagttctatagctaaatctccccaaattaatacttcgagatctattagcacatatatctggtttttgtcggtttaatgtacaccaattcagtcttaaccatttgaaaacaaactttaaccaaaactaaaccaaaattatcaaaaagtaacccgaacccgccgacctattaatgatccgatccaacgcttcttcttcacctgaaattttgcttggattatcttcgtttaaaaacaatactagactaactttttcctgatgaaatcaatgatcgatcttggatgcaagtataaagagactttcctcatcatgtggggtattaagtatacttgcaccaaattaataggtcggcgggttcgggttaatttttgataattttggtttagttttggttaaaatttgttttcaaatggttaagactgaattggtgtacattaaaccgacaaaaaccagatatatgtgttaatagatctcgaagtattaatttggggagatttagctatagaacttacgtttcggggagaaataggtttaaaactttgttttcatggacatgtagaccggggttgaagtttgagctctatttggcatgatacggtacttctcgtgaggaaatagaccgtttttccactaaaacccaaactagaagaaaataaataaatagtttatttttatttttatatgccaatagtttttttctttcttttacatcttaataataaatattcaatcaacaaagttagatcgaacactttgagccagatctgttatttttggggtcaaactttaaaaattttaaaataagaatataaaaatatatgcttttcttagagatcttttcttttctttttgcatattaaaaggaaaggtgttaaaatcacatcttttttatgagctggatagtcaaatttatatactattccattttttggtcaactattaatggtactatttgatttatttctattaaataaataaaattaattaattgaattgatgttataaaaaaataaaaatttggatttatttcttgtatatattgtaaaataaataaatgtattgtattaacattaggagttggtgtatattgacacttgggtcctttagtttgtatatatattgtccataaattattgataagataggactaaaaacagtatatgcttgggtacaagccagtgggtaattccaatttttattttaaaagaaacagaaaaaaaactctggaattttgataacagttttccagctacccgaacgtgatttttgcctgtaatcacgtacatccataaagcatgtatatcaaaacagtagaataagtcaaaactaaatttcgagccctgtgacacttttcctctttacgttggcatctatatttaaccttcttcttttttttttactggttacacaaaatatactttcactattgcatgtagtagatacacctcaacccttacgtgcccatccgcaacaacaaatatcatgatatttattatttactgattccttatgatactttgttgcagtaaattaaaatcactataaattagaagagaagcatcacttttattcttctccattaacaaaaaagagagagagaacctaaaaagaagagaagagaaagagagatccgaaatgtcggtgacatcaacggtggaggagaaccaccagaaaaatccatcaacgccggcggcggtggaggagaagaagaagaggagatgggtgttttgggatagaaggtggaggagattagattatgtgaaattctcagcttctttcactgttcattctcttgctctcttggctccgttttatttcacttggtcggctctttgggttacgtttttgttttacaccatcggtggtcttggtatcaccgtctcttatcatcgcaacttggctcaccggagtttcaaagtccctaaatggcttgagtatctcttagcctattgtgcccttctcgctattcaggttcataacccttttttattttatttttaaagtctatttaattttatagatcttaagatcttaattgcttcttgtactttattttatttagatcttaaaactttattttattttattttttaaaaatagggagatccgattgattgggtgagtacacatcgttaccatcaccagttcacggattcagaacgtgatccacatagtcctaaggaaggtttttggtttagtcatcttctttggatctatgactctgcctatcttgtttcaaaggtgattttatttgtatgtttattttgttgtggatagtctatttcgctataattcgttttggctataaccaaaagattcaaattaaatacagtgtggaagaagagcaaacgtggaggatttgaagaggcaatggttttataggtttcttcagaaaacagtgctatttcacattttaggattgggtttctttctcttctaccttggtggcatgtccttcgttacttggggaatggtaagtgaatgtctctatatatttttaaaacgtatagtattttggtcgatataaattgtagaatcaattagcaattaatgtatgggttggtgagattctcagggggtaggagcagcattggaagtgcacgtgacttgcctcataaattcactctgccatatttggggcactcgaacttggaagaccaatgacacttctcgtaatgtttggtatgtcaatattatctcttaacatttttggtttctgtactttgaatggtataatatcttttatgacactttcccaaaatacaaaagtacacatgaattggagacagctcatataaagtcatgtttccaaaaactcaataatgtagttgaattatttatatcttttttgttttttgaaaggtggttatcggtattttcatttggagagagttggcacaacaatcatcatgcgttcgagtcatcggctagacaaggacttgaatggtggcaaatagacatttcgtggtacattgttcggtttttcgaaattatcggtttagcgaccgatgtgaaagtgccaacggaggctcaacgacgtcgtatggctatagttcgttgatggaaattgcgggaagagcatagaaaaagggatctattctatgtaattagaataatttctaatcctaaaagagagttattgttttattttctttattactacttttgaagttttgggttaacgcaaaggacgtttccgatgtgttttggtgttggaccaagttgattaagatatttgtcgtaattggtacttatatataaaatcttagtggggacaattaatacgttaattacggtctctatgtgagacttattttaatatatagacttctctaaaatatctaatcgtcgtttacgataaaagaagaaaagcaaaaagacataagacttgttcaaaaggagatgatattggttggttgttggagtttatagccacatataaaattaccttttttatgtgattttttgtgatcatttcaatagatatatataaagatgaaaaagaaaattacaaaagaagaaaagcagagactttttcaatgcgaatatattggtttttggagttcattggctttttggttaaaacctaaagtttgatgtacgtatatcaacattatcacctttgctttttacgttgaagtcggcactattttatctctttcggatttgaagtcggtactctttcttaactgttgggttttctttaaaaaaatggtacacaagtttataggctgcttggattttcttgtaaataggaatatatgattttacctttggattttattcttggcgaatagtatttcttttgaaatgagtggtcctagaaataaagagaaatgtattctattctttttcaattgagtcaaaaaattcgaatttgaaaaaaaataggttaggttatttattaaagcttatattagtgacaatgaccaacttgattctcttcatcaacgatcaaatcctactagctaatcatcaaatatcgtcaactctatcaacaaggacaaatgttaaaaaaaagtaaactcttgttttggctttggaaaatttaatcttggttgttatttttttttttcgtttttttggggtgaagttactgcaaataaagttacgactattacaatggtcataacacaaatattctattaacactcttaactaaatttcttaaatcagtaacgagctgttaaacacaagttgtttgaaatttgagtagaaaaagaaaaattagaagttttacaacaaagttaataaaaaatgtctctttttttaggttttgtatttgtatttttttttataaaacgtcaaagtcaaagggtgcacactcatttgaggactacataagcaaaccaaaggtttacctcagaaaaagcctaagcttagaaatcatcctttgctttccggataatccctaaagcttctgcttcatctgcggcctctggaatgcgtaaagcccgacggatatctgtatttgagctgcggaggaaggggttacaagctttctccatcttcactgttgtcggaatctgaagtttgacaaagaatcaacactaagttaaccaagagaattgagtagtgaataacgatcattggtgatgaaactgtttttaccgttggtaatttcttgcttcggagctctgcaacatgagctgcataggactgaagtacttcgttgtttggctctagagacaacgcaaacttggaattactctgcacacccaaatcaaattatagtcatctgagattatctcttttagtaaaaaacttttcaccaacactagaatactaaagtacaacagaccagtgtatattcatgaccacagtatatgcttgtgtcatctggtaaagatgtgatcttttggagagaagcaagcatctgcagaacatgtgcagaggatttaaaaatatacatgaattgattctgagagtttggttccaaaggaaatgtacataagcagaaagatggagagggatatgtgctgtttacctgcttaggagtgccttcaaagagtttaccacatgataagctaaacatcgtgtccccggtgaagatcgctcgtgatcctggaaagtataagctgatatggcctgcaagtataattaagaagataagagacaaagactaaaacatgggacaacaacgcttaagaggtatataacgggatggttttcgcagaaaccgtcaaaaccacagatagatgttggccatatgcatatctaatttgaagaagagaagaacagaactgttctggttacataatttatggtagaactctcatgtttcctcaatacaatgcatgtacaaactttaaaacccaaggatcataagagagaaaccccaacttttccagacaaaattccccataatccacaagtctgttgaaaaatagtcaaactcctgtacgtttagatgtgcatttggcttctttgaacaagacatacaattctatcttcggcggcaagttaagagttacgaccacaaaatccaccgtagctaaaccaaatctccaatctcagcttaaattcatacataactgagatataatgaagacactgaacataggctgaaataatcgaattccgaactactttaaagtggaatatttagcaaagcaaaggcttaactggaatgcaagaacatgcattcaaagctccaaaagttaatatgagaattataaacaaccttttgtgtggccaggagtatccataacatggacttcatggccagcaaacatccatttgtcaccatccttcaaggccatatcaattccaggaatccggtctttatccatagctgagccaatcacctgcataccaaagatgtaaccttcgtttataccaacattctttttaaatgttatcattgcacaacgagtacataaagagaagttaaaacatcctacctttgccccgtacctgtcttttaattccaaattcccaccagtgtgatcataatgatgatgtgtatttaatatatatgttagattacgaccactcctcttcaacgaatcgataataggttcagcttcagaagggtcaaccaccccaactgtaccagtatcctcgtcatgcaagatataagcatagttatccttaaggcaaggcacctggaaagaataaacacctgggaatcattttcattacatgataacctactacatgggctcaaacaaatctagagaccaaattagtaagtactgtgagaaaatggtttaggagattcccaacagcacgcaccagttcaatttgcaatgaggagacattggagacactgcagaactttgaaactcggatagatttaccagcaccacgcaaagtcctaagaggtgaagagaccagcttcatcactctgcacacaagactctttcttatgttaagctgtctcacacatggctggcttgatagcttctggaagcaatcaaaataaacagagagatgttaggcatgaaaataaatactcaaacaagaggcaacaagaagctttctcaatatcttaggcatgaaaatgaaatcatcaaaatgatcatcacgtattaaccatgaatcatcaaaaggttcagattttatcttgtcatgaatgaaatttcagaatttcagaaaacaaaaacaatcacaattatagtttcttcccaaagacaaagaatcacaagaatcgagaagaggaaaagaaaacaaaccctagaacatcgaaaaaaggaggtggcagaagaagctttcgagatggtttgcatatctctctatggatcgatgttcaaagagaattatctctctatggatcgaagaatttctcttcccctctcaatctctcagagaattctctcttggatcaaaacgatcttcgaagagaattgacggagaaagagcgtcagcgagaagaagaagaagccgtacagagagagagcaatgtgtcgcctcctagaacatcctaaaccggaacgaaccggaccgggacaagtggtgccgaatactaaaccaaaatattaaacagcgaggcatctctgaatttaggtaagacgtgttttcacgactacaaaatgtgcatcaaaattttaatttaattaaacttttgatttatttcaaattttttttaatgaaaatgaaacttaatattgtttttttatggtaggaatgaaaatgaacttaattgttgtgcttaaatacaagatttgatcatattatttaaactttgccgacaaaaggcactttttcatgtaattttaaaattcaaattgacttgatgatttagtaatgttcaatttttttacattcacctgattttactatagaaagcaatgtcggagaacgtttcagaaaagtaagagaattatccttttaatcttataagagattattatataatcaatgttttgaaataagttacaacatgaatcatgcatgctttatactataaaataaattaaagaaaaagaagaagaaacatgaactcacatgatcgatgacatgacgcgagcatatatgtaattaaacttgtatattaaagaaaacttgttttctcaattgtagtatttcgttaggtggacctatagtcctatacacgcatgcaagtatgtaacaattaacataagtgataagccttgtttaagagcataaatcgtaaggacctacctaggaatatgctcggccaactaaaccgggattatgatccggttttcagaatttttttgcgtgtgaataaagaactcgtggtgtaaaggcgaaccgagtcgggtgtttgattaattccaatattaattgtgttgttcaaatgttttcaagccgagtttcttcccaaataaaagtcatatctcatgaaattcctaagagaccaaaattcccgagtcaaataaacaaacaaaccctgattttatctataaacacatacacatttttattaagttataatcaagctaaatataaaaataaaagaaaaatctctaatctccacgcatattgtttactttactgctcctaatgaaagtgaaacacatgtatatttatgaacgtaatagtattgtggtatttactgatcaggtgtatcataaaataaggcgactttaaagtttcgtttgagttttatacatattgtgtttaccatcttaaaatatgtgtggtattcttacatgttcaatgcaaacgtaaacaaataatcatatttaactaatttcaaacataaatttcgttaataactacagtataacttaccgaattgaattggaattttgatttgatatatggtccacgtgtttataaactttgataaatcaatcctttgaaaattttgatgaataagcatagactcttttttagcaactttttaccaatgtgatatacaatatggattaccaactttgtcaacaacaaaatgataccaaagttgcatacaatacaaatggtacggatcaataaaaaaaagtggcggcatagttgtcaagttgtagctacgtacaagagaaactcaaaccaagagtggcggtatatttatgatttatcacctctaattagcactcctcatctcttctggttgtcattctcgacgaatcttatgccttggtttacaatttggactagtatatacgatgaatcaaactagaaattatcgtccatagatcatttaatttcgtacatttagacgaaaaagggctaaagacaaatttattagtaccccaaatttttctcttacaaaatataaacatattacagcgatttaataactcgaaaattaataccttcagaatattagtaaaaatttagatatgaaaattagagtacattcatttgtcatcataacactttttgacgcatgcatgcttgtatctttattttcgcattattttatcataagatctctagtatcgtaagtactaccatattattaacaatgatctcttactctctttcagaacaaagcttcaccaaaagctatccaacttattaaaaaaagaaaacactttgcttttgtaagagatgatatatattttagttgagtgtctattaatatctttcaattagcaaaagagaatccatttccacactctgtcacgaaaagagaaagttgtatctgactacgaagccaaatgaaaccaatctgaaccgaaaccagaattcggtttagaatgaggctgctagggccaggtcttgtatatttttagcaaaagcctgtgtggacttggacaaaccgtgtctaagtgaattttatatttcaaaatccttcaaatttggttcaaaatgttgaaaacgaattcttttgtagtaaagtcaaagtcaaatttcatgtatgtgtgtgtatacataaacataagatagtgagaccaaactagcacaagtcaaacaatgacatctcaaaaaccctatatatatgagtcattatcgaatttattacacatacaaaacaaaaacaaaaaaaactctacattcaccaataaaaaagctcaattttgtttttgtttctcattcgaaaaactaaaattctaaacatgatgaaaaaacaattggtggtcgtagttatgttagttgttatgttcgttgttttcttggacgctacgcaagttgaagccatgaggcctttcccagatcccgtagatgagatccggcttctgtttcaggcgttgcaaagaggaccggtccgtggttctggtcggaacggttgcactaatattcctcgcggttcaggcagatgccataactgagctgtcttatacgaatcttcttcttcttcatcttcatcattctttaattccatattttttttcctcacatttgtgtgttacgtacataattacatttacgtaattatacgatagctttagacttcgtctcatgtaattgaattgtaatcaacggaaatttaattagtctattagcgtgtttgtactcaatacaaacatgttttttcactattcactagttggtcaagaaaaatgtaaatgtaacaatccaaagatttttcattttaacaacaaactttattggacttttcggcttggaaaggtagacaatacagtgaataattgaattctttgacttataattttacttgaaaaaaatcgacataaacacagcaacatgcgctttatatacagcgtctgaagagaaagacgttctcatggcaatgtattcccacttacacgattacaccgttctgtagctggaggtttttccctccgacgtctcttcttaatgtgattttactaaaagtcagaccttgacggcaacaaaaacaacgcccctttatgttttctacttcacggtaaaacctgagtccgacatgtgtacgtgcacaagataccgagatttcatcgacgttcctgtgaaaacaaaacctgcattgatgtgtgaaacttgggataattagttttatcagtagaagtaacagcaacattgtacgtttgttgagacttgaggattcatcgatgctaacgcatcaacttgaacagataagtttttgaatcgaaagtttacgaaagtcctaagttcattatcctctaaagcaatgtgatgcaagagagctagaaacagagcgtgtaatcgtctctacctgtgtgaaactgcctatgttctgtagccaagcattaaatgcttgtaataacgaccccggatgattctctgccaccaatattttgttgagctccaataactcatctgcatccgctcttggatgagcctgtaatgcaaatcatgagcgtaagtaaaaaaacagagtttcaaagagcagatccataggagaagggaagaaagtttgctgaccatctaacaaggcatcttttaatgccttgagatattggccggaaaaaagatggatctcgctgagtatacagtatcccaacctgaaacagaattaatcagtttttagtaaaatgggtctcgaaattagtgtctactgatcaagaaaagatagaagtttttacctcaaccaatgccatagctgaagggtcttcaaagatctcaaggctatagtcacccaaataatttacctatagaatcattgatgcttgtacactattagtgatgctataatcattagtttcatgtccgataaggtaaaactgaacactttggctttatttccatcaagggtctagaagagtaggtaccgcgaattctgtattgacaagagcttggacaaaatccatcagctgaattttagcccactcagagttctgtgtaggatcctcagtttgcggaggatgcctccatgaagcaccaaaacgtaatttttcatacggaatgcttccttttcgtacatcagtggcataccgttgaagccgcaacaacgctttgtccattgcaggattaaccacagcaacctaaacaaggaaatagactataaaattaacgatgactttcgtgcgtaatttgaaagcaatcactttaaatgagcttacttgtaaatatgccaagtatgcatccacaatatcttcaaatgtacctgctttactccccatcaaactgataaaacacaacggcactaggtcacatttgagaaacgaaaaaatagagggttgacacattttgagattagagcaaacgaaagaacaggaaaccattacctctggtaatgattactttgtttaagcgcataaagctcaaatagatgccgagaattcgcaccaagaacatcagcaatgatagtccactacaattccaacatatgttaaacctctagtaatatacagcatctcaattaaaaaaagaatgaccagtaaaattttagcataaaagatcattcaacctttctggtttgatattattaggttttagagttgtcacatattttggtttcattaaacaagcagtgccattacctacagcatttttctcacctccgaagcactgaagtaatcaggaaccatgtgtaattttgcttcttgaggattccatccaaatgtctacaaatgaaacaaagccaaagtgcaacgtaagaaaggtagaatgaagaaaaataaaaaatgaactttcatgttgatataatgaaggtgagacggggaaactctacataatatatcaaattaccaatacatgctcacacaaatacacacagaatcaatagtttacttagatgtatacatgtagcttctatacctcacgagagatgaaaatgtctggaaacccgtagtcaacaaaggcttgatatgaatagtagctgtcataattcaaattattagacatcagataaaatgataaaaaagtttcaaaagacatttctgtaactaagagccaagttcagaatggaaaatgattattcagactttcggtaacttaatggcatactacaaagtgatacaagtcagaaaccagtttcccctctagtgttgagaaattgaaacttaaaggctagattaagagaccacgtaatcatcagatagtaacagattgtccttattaaacccaaaaatgctaacaaaaaacaggacaaacctgtccgaagtcacgaataggacaggtagacagcgctcattcgcacctaacgctattattctccaaataagattgtcatggtacattgacgctgagactgttgaatcatcagtctgaatagccctcttcaagatttcaatgttgttcaagaccagcttaggctgtcaaatgaaacaagaaatagagacaaacaaaaataacatcaatagttggcaaactgtttccagatgaatacatttactgtttaccactcataagatcaaagattccattccattacttatctattccattacctggaagaagccaatctctgcagcttgtgataacaactcaagcattagcaacggccaatcagtacatgaattcgctaaagttctcgaaaacccattagttcgattaagatgagcaatggcattggctttccaaccctggtgcaccttaataacctctttagccaatcttaacgcaaaagcagtctctctataatacgaagcctcttcaacggacaagctattacctttctcttccaattcaagcaacccatcaatctcatcggcattttgtcgaacagatagggcatacacagcccgttcccagagaaatgaaaccgagactttctctggaacagcaatgttataaccctgaagtatacgacgaagtgcagtattaagaccataccatttgttcatagtagtgaaaatctgctgcgagcttatactcccaagtttgatagctttgtgactcatagattcaagacaattctcgagctgggttttgcaattggacaacaacggtgggtcaacactggtccaagacgtccatggatatgattggtggtgatctggatggtgttccgttatcgattgcgcaaaatctacatagccagcgagatgtggccctttgttccaatctccgagtagacctaataagaacgagatcgggaacgaatcaaaggtacgatcatttgaacaaaattggggaaattagggattcaaagagaggattttacggttgaggatcaatgtggttttgccgacgccacgaggaccatggaggatgagaggctgaggaacacggtggcgttggacatggttgttgagaactgtttctagaagcggctttggaattatcttccaatgtttattcaccatttctctgcttctccttcttcttgagctcgatcagtgtatggggtttaaggacactcccaaatctcaggggaaatgttcaatccaaaaccatggagggtttaagcgttcaaggatctctcgccaacgaagaacaaatttcaactcgaaccaatctcaaccggtttatacaatcgaaccaatatgaaccggtttatacaatctgaatcatttatcgtctcttaaaccaaataagaagactattattccggttatcaaacatttccagtactattacaaatttgttaaacaaacttatactttcaaacaaatttgctctcatagctttgttacaacttacaagaacatgtaaagcatagtttctcgtatacaacaaaaatgaatacaaaaagttccacccatagtccaaattttggtattgagatcaagcttgagattcacaagagggatcatccgtggcacgaacccgagcctttggggatgtgagagcaacggttaggaccagatccagggaccgtacccttctgcaaggactcgaacacgaaccggatatcactatcgaaggtgattcttaacatcctcgtggcttctacttttgtggagtccaagaaaaccacaaaaatggcaagcataatcactccaaagattacttaattcttcataatcatcactttaactttgtttctttgtactaaaaagtatttgtagtaagttcgtttactcttttgtgtcgcattgaaagatatgaatatgagttaaatatatagagagggagggtttactttttttttgtcgtcagggagggtttacttggattcttatggattgactttttagttggaaaaaattggttctcgacatttgaactagaaaataaagattgagactgattaaacaagttaacacgtaaaccggttttgtcttggaccgcaagatttcttgct

SEQ ID NO: 316 - DNA, 79734 bp, Arabidopsis thaliana
aagcttgaccattaaacaaacagaaccttcttgataaaatgctcgaattcaaaatttaagtaccgattggtcctagaagaatctgtaaattaaacagctcttggtaagaaccaaacctagctttcaaaacatgaaataacaataagaaacctttttcgattgaacggcgaaatatatccattgaagatgttgagagtgagaatcgaagacgaagaggtgcaattactcgcagtttttttttttttgtaagttaattattaatttttgacttcattaaagttaattatttgctgaaaaaaaaaaaaaaaaaagttaattatttagtatcttcaaatataatatttaaaaaaatctagccatcttaatgcattttaatgaaaatcctacccaagttttttaaaggtcaatttaaaaagtatcagttttgatttttaattatattcaatatttgttaaattttgtttcatatgttaatattaaaaacacaatctatttcctaaacatttatatacagatcttttttaaaaaaggttagtcaaaaactgttggaaaagctaatctttttttaacaaaaatagtaaaatactcatatacgtaactttgggcctttcttaaatggctttgggcctttcgtaaatgggcttatgggcttaagtacttcaaatctgatagtatttggtttattgcaacaaaaacaataaatggaaatagcgatctgagctgaccaaccacagtcgcggacagagctaaaaccaccatttgaagaaggagaagaagaagaagacgattcggtgaaagcgaagatgggtggaggaatggaaacgaacaagaacaagttcatcgaggactggggatctgctagagagaatctcgagcacaatttccgctggactcgtcgtaacttcgctctcatcggaatcttcggcatcgctctcccgatcattgtctacaagggaatcgtcaaagatttcgtgagtttaaatctctctatctctatctcattctcgatcctatttgcatttcgaatcctcccgagttagatatctgttttgtgccctaatttttcatgtatcgtatggaattggatcgtttgatacatttgaaattggggtttaattttagctgtagatgcatttgaattagattagttcttttgctgcaacgattggattcggaactggatttcaattttcacctccatactagtattcttaggtgatgatggttcgatttcagattgattataactcaaaattttcgagaccgaccaatgaaagtctaagattggagttagggcagaagaaatttagttctcttttagcttgtaaaaattggatctttggctaaaaaaatggttttaactgctttctattgttctgagtttgagtctgagctgatttggttatgaaaaattatgtatagtggactttcaaggttcttaatctctcagcagttcattgctacaatccttgaggattcttcctccatagtagtttctactctgtgtccttgaatatagattcttgttaggaccatgtttatgtggttgatgatctatgccatcccttgttagtggaatttgtctatgacgattgagatggaaattttttttatgtgttacttccaatacaattgtgtagttattgtgattaatatactaagttcaatctaatggactctaaactcattttttgatagcatatgcaagatgaagatgcaggcagaccacacagaaagttcctctgaggttgtttgcaagaacactctctgcaataaagtctcagcaatgtgaaatttcaagacgaggatgttaaaacccgcttttgttttttcatttcaatcaacatctggaacccaaggatataatttattttttggaaaagtttgttgtaatgactacactttgttatgcaaataaacaaaactcagttttcccttgagtttgacatacttattgtgtgtgttgattcagcatatgcaggatttaaacacttgttctagaggcacaaaataaaatgaagcattgaaccaaatcaaggtccgaaacaaaataaatggttatcctgaaagcaaacccctgaacttggatatgagtcaaatggtgtatgtgggtaggtgtatagtcttaacaagtaatgctcattgtgaacttgaagcaaaaataccccctcactagtcactatgaaaccatgtctttaactttaacattaagttttgatctatggatcgtcgaatggatttataagttcaacttttgtttacaaatatagttattttcttaagaatttttttaacaaaataaaacaattatgaacaataggtgaaaaaatggcgggaggaggaaacagaaaggaagggcaacaaagttaacggaatatataaaaaaacacaacaacgaacagattgtcttaaccaaaaatagaaagatttctccaatccatccaatatttgtttccctctcaatctcctctcctctcttttaggactttccctctttcttcaaacatacaacagattaacaaatagaaaacgaagcacaaaagatatcagaagaagagagaagtctcctcccaaaaaaaccaaaaaaaaaaaaaaaaagagaaagaaaagaactcgagtgcaaaaagcttctctcttccttcccatggggtgcatttgaactaatctcctccttgaaatcgcttgattgattgttataaatcgattaatcgattcaaaccgttggatattattccaaaacaacccaaaaagagaatcccatgggaagttgtgtttcgtcgccattgaaaggctctccttttggaaagagaccggtaagaaggcgacacagtagtaatagcagaacatcctctgttcctcgtttcgattcttcaactaatctttcccggagattgattttccagccaccaagccgcgttctccccgagcctatcggtgatggaattcacctcaagtatgatttgggaaaagaactaggccgtggtgaatttggtgtcactcatgaatgtatcgagatcagtacccgagaaaggtctttcctctgttttgatatgtttttattcttttcttctcttgatctcggtttgattttcgtgtaaccgcgcgggcatgcagatttgcgtgtaagaggatatcgaaggagaagctaaggacggagatagatgtggaggatgtgagaagagaggttgagatcatgagatgtttaccaaaacatcctaatattgttagctttaaggaagcttttgaggacaaagacgctgtctatcttgtcatggagatttgtgaaggaggtgaactttttgaccgcattgtctctagagggcattacactgaacgcgccgctgcatctgttgctaaaaccattcttgaagttgtcaaggtgcaaaacaaaatttgtaatctcctttttttgtgtcggttttttggcttcttgtttggttctttatgtttgttgttttgtgaaggtgtgtcatgaacatggagtgattcatcgtgatcttaaaccagagaacttcctcttttcgaatggaactgagactgcacaactcaaagccattgattttggtctctccattttcttcaaaccgggtactaattaattatcataactctattataacatcataaactttgaatcttgtgtcatcattttcttcaaaaattcggtttctgtaaaatggatattgcagcccagcggttcaatgagattgtgggaagtccttactacatggctccagaggttttgagacgaaattacggtcctgagatcgatgtttggagtgctggtgttatactctatatcttgctttgtggtgttcctcccttttgggcagaaaccgaggaaggaatcgcgcacgctattgtgagagggaacatcgatttcgagagagatccatggccaaaagtctcacatgaagccaaggaactcgttaagaacatgcttgatgcaaatccttatagcagactcacagtccaagaagtgcttggtatatatttaataataacgtttgataaacggtaagtaaataaacgacatcaactgatcaaaaatctatgttttacagaacatccatggatccggaacgcagagagagcaccaaatgtgaatcttggagataacgtcaggaccaagattcaacaattcttgttgatgaacaggttcaagaagaaagtcctcagggtatatataagtttcttgatttcccatattttatgagtttactctctccttgttactgatacggcaatctttcagattgtagcggacaatctaccaaacgaggagatagcagcgatagtacagatgtttcaaacaatggacactgataagaatggtcacttgacttttgaggagctaagagatggactgaagaagattggacaagttgttcccgatggcgatgtgaagatgctaatggatgcagcggatacagatggaaatgggatgttgagctgtgatgagtttgtgacactctcaatacatttgaagagaatgggatgtgatgagcatttgcaggaagcattcaagtattttgacaagaacgggaacggatttatcgagctagatgagctcaaggtagctctttgcgatgataagctaggccacgctaacggtaacgaccagtggatcaaagatatcttctttgacgtcgacctcaacaaggtaaatgaaccaaattagggccaaaaaaggttgagtgcgtggcaaggttcacggtgttccatctcaaaacttaaatcatgttttggatggtaaatttggtacttatactttttcgatgtgaaaattttgtggtgacaggatggacggataagctttgatgagtttaaggcaatgatgaaatcagggacggattggaaaatggcgtcgaggcagtactcgagggcgttgttgaatgctctaagcatcaagatgttcaaagaagattttggggacaatggtcctaagtcacattccatggagttccctatagcaaggaagagggctaagctgcttgatgctcccaagaacaaatcaatggagcttcagatctccaaaacctataaaccctcaggtctaagaaactaaagaagagaaaaaatgaacaagcaaaagactctttgattctttttaatgtgtttgtttttggtgctacaagtgcaaaaagtgtgatttaatgggcttaactctgcgttgttcatctttttccttaaaggtcgttaaacacattcatttaatttattaagttgtagcattaacaatggcgtcacatgtagtgtaaagttttccaagctgtgcaagtagaaactcttgtataagttacaaaaaccaaaatgattcaatattaaacactttctttagatgaaacatgaattcaaatattacaaacataaaagagatggtcacgtaaagccaaacaaagcaagtaccatttgctcttttttttctttaaaaccagacacatgaggtcactggattttggtttcacagagattgccatagcagagtaggcaacagaattattgttacaatgtgtgtagagatagataaacacatacatattcttttacactatacataagtaggaaacttgtcacaaatccgatgatccaaatcgcatacacgcatgacagaagaattagaattccactatgtgcatgcagtttgggcttttcctcgagcgtgtgcattgtacaattgcatacgatcaattcgggttttgtaccttggcgaggatccaccagttctggattattataagttgtcatctgggtttctgctggatccaccagttctggaacttcctttgcctttacctcttgttttgctactgcaacctgttgatttagagcttgttgatttgctgctgcaagccgcatgtgagtctacatcagcaagaccgttctccagagctttcaccaaattctcaaagtagtttttcgtcacgctgtaagaatacaaaaatatagaaatatgggtttagctttctgaaaaatgtgaagggcatttataagaagaatacttggtgaaagtctcgactaggtcagcttagctacttcagaaaactaccacaggacctaacattatgtatgccttgtggtttaaatatagcagacttagtcacttacatagggtttcgcacaaattatattcctacatctatctgaaagccttaagcactttcttcttcttcttcttcttcttctctgtcacacaacaggatagatgtatgaagaaaaaacgcttacctggtcaaaccagctagttttgtccggaaatcattgaaatcttttgatggaccttccgcaatgagaaactgaaccaagtctttctctacgcattgatggagcctctctaaacctgactcagcttcacctgaacaataggaaaaagttaagatgcttctgaagaagaaaaagatagacaaataaatgacggagggttctgacttctgaccttgcaaatactcgaaaaattgtcgtttggcatgttcatgctcaggtaggtagtatccatatgcataagtccatttcaagactcgcctacattcgatgatctgcatcagtaaaatcacatgagaaactgttaagaaaaatgctatggaacagtctcgcttagtcaacacttttatttgctaacctgaagccaagcttctaaaatgaatttgagctgagactctggtgtgcactgtttatcactaagcttctcaagctggcagaaattgagatgagtcaaatatagatagcagaatatattagaaacagccaaaacgttatacttctcaaaatattttctaccatcagaacctcccacccatgaataaacacaatagtttcaaatgcatatgccgatgctttataaacagacaaatgaaatacttaaaaagcagaacaacggcgcagtgcgggttttaagaccaggaaacatttgtgaacgttgaactttataattcagtaactcactgagatgaatagacgaagagattcagaaagaagcaaaattctaaagaacataacaagtcttacattctgcatctgcgcttgctgcagatcagccatagccttttgcctcgactgccaaatcacccaaacaaagaaattaataatgacgacctagaaacgtcctcagacataagaagtgttagcattatgcataccgtttgattgcttgcccagcgttcataatagtgtgtgtatctctctagcgaatttttggccatctctctcctcctctctgtctcatcatactaacaggcagagatgaacccaattcaatattttttattttttttatttttttccaattcaatattcagtaacatgcaaatgactaataagaaattccaccaaagatcaaataagtacccgagatcttacctgtccttcttgcttggccacctcataacggttacaagcataaaaaccaccagttctttccccgtgatccatccatgcaccaagacatagcctataggtgtaaatatataaacagcattattagcattgaagaccacgtttctagtacaaaataacagagatacagtttcaactaaactaagacgttagagacggaattgacacattaccaacaaaattcatatttacaaggcggtgtacatgtcatgtgcatacagccctgattcttttcaattggcctcttacatctcggacaaggctttgaattggcaagtatcctgagcataagagaaggcagagtttgattaccaagaaatatatgttaactcaagatgctcagaggtggtaagatatctgtatctatttaaaagccaaagttcagggatcaagtacacgagtaaaagaaaaagatatagatagagtggataccaattcatattttcagattcagcgctgttctttaatatccattttgaaactgtgctacaatccacaggtcggtgagcctcctcagtgcactacaattcagatttaccacagcgctattgatcaaccaataacattgaataactaggataaatcagatcagtgggctttgacacaagaacttacattccagcaaaagctaaacgagcacaagcaggaaacatcataatttccagaccctgcaacaaaatcaatcgcaaaatcacatcccggggcaggacaccacttcatctgaaccaaatagcataatgattagaaacatcgcatcataagaataaatatagagagagactaatatagtttgctactttgctcaatgcaaaggtatcgaaggtaacttgagaataggaaaaatatttatgtaatcatgaaaagaacagaatcttctaacaacactagtaacatgctacaaaatagagatgacaaaaacttcaggatgctcaacagacagaacccactattcttcaaccggaaaatagtgtcaatcatagagcaaataggaaggagagtaaaacgtttcaagtaatataatatgatatctcaataaaagaccagcgacattaataccagtctgtgtgatataaattttctagactgcttacctttctgttgtcttcaatataagacctaagaaaatatctgttgtacttctccttttcgtcttcagacgctaatttgtcaaccatatcatgaccaacagcagcaagacaagatgggtcaggacatcttagcatcaaacatcccgggccatcattaatggttgtgctgatataacctgcaaaagcgtatacagtaaaacgtaagctaccactcaacaaattgttggagaaatatggggcacataagtttgttttagtaaactaagagatggaagaattcgaaagtaacaactaaattggaagaattcgaaagtaacaaccaatggtctaatcctaacctcagacaaatacaaggaaaatgaagcggttttcattctttgatttaactaaagatgtaagagtcttgaggatactaatgaaaaaaacacaactgacctgtccagcatgtagtgcagaaaggatggccacaagaaactgaagcgattttctcaggagggtaggaatcgaaacagattccacatgtaagctgcacatatgatcatgtgttagtgagaccatgaattgtcagacgagaaacatgtaaaaccacttcagatactacaatttaaaggacatacttcactgtcatcagatggtggaacaacatgactctccaatatgccaacagtcttccgaactctctcttcatcagcaaaccactcatcatgaactctaccgacactcctgaaatgagatgtttatcattgcatcaggaagctataataaccacacaagtatggccatggatatacattctagaaaaactaaagagaggtaaacaaggaattatatatatgcaaatgaaactaatgtgaaacacatagcgtttaccagtgaaagtgacgaagtagaatactcgcttcaacctcagttatcgagagaacaacggaaactcgttcaatattatccatctgatgcctgcgaatatcttcttccctcagaacacaaaagtttttctggaaagaagtaacattatagttataatgagtcaatattcacagatacagtagacatggaactaaatgagtagagagaaattccatgctaaactttgtagcctcaattagactctacctcccaaataaaaaccactttatcatgaaaagccccaaagtttcaacatttcgccatcagataagtaaaaaaaacatgcacgagttctaaaagcaattagcttcaacaaccaacaccaaaatgaattaagaaacaaaaacaaaaacccacctgagagcgatgagaggcgatcatagcagaatcatcagcatcttcctcaacaaacccataatcaggttcaccatcatcactatcattacaatcatcagttccaccgctgtagaaatcatcctctccagactccatatcgtgcgcatcgagcatgtcttcttcagaatccatgatcagagaaaacgaaatggcaaaaagaaccgagatttatataaattagaagaaacccctcttcttgcaaaattagggtttgtgggaaacacaaatcgcaggggatatagtgaacagcttgtaaggaaagggagaagcaaaatagaggttttgatgagagaataaattaggacagaagtggccaaatggttgtggtctgatctaggagaaagggaatctaaagagactggatcggttgggtttgcgataactggaatagagtgtagacttgtatcacttactacatcacatttatcattttcataaagttagtaccaaaaaatctaacatgcctctcaacaaatggaaatgattatgattttggaggaagattattgtttttcttttttcctttacttcttggagaaagtaatcaattttatatcgcctaaatatctataatatttttttgtcacttattatattagatcttagtattttcattaaaactcaatagtatttttatttatatgatcaaccatgacatttattttgtactcaattcagatggtgatttagtatcaacaaataaataaatatatatatatatatatattaaaaagaagtataactgaattgtattaatagaattttttttctaaattatttattaaaatctttgtttttgtaggaatctaattctttatttatgtgattgataatactacaatagcatgatgttgaaaaattagagttggtttttttttttacgtcaaaacaattatattaatcaattagagtcattacaaaagtatcgatcaagccaaataggtaaagaaccagaaccagaataaaaggtagaataagtacaaccatatttcgctaagacatgagctaatttgtttccctttctcctaataaaaccaaactgaatgcttgcaaatttatttgcccaaaaactgatgtcctccaggtgatttgctaaggaactgtgaaacgaaatcccattaatcaagttaattagcgtctgacaatcgccttccatgaatacttgtgtgtatcctcgaatccaggtttgttgtaaagccgccaaaagagctttggtttctgcctcaagcggattactcgtatgagccaacttcattgaaccccatgaaattggtgtcccgtaatgatttctgatgatccagcctcctgtagcttccaacttctgtacatcgaaaccagcatcaaaattacactttacatatgtggcaggtggattcctccattctattttattctctgcaatttgtcgagtcggtgatggtgttttcttatggctttgtgttgcattgagccaatcatgtgtttcagcctttgcacttaaaacagtttttgacgggctttctctgaacttattgaatactacattatttcttgccttccatattcgccatatgagccaaaccgggagaagcttatggaaatctgacattgtggtatcctggacaaagttcaagatattggagatgttttcttcaaagtcgtttgacataagttgattacgaatgagtgacgaatccgataaccaccaagccattgttgcgaaagggcaagtaaagagagcatggttaatcgattcattttcccgatggcaacgaggacaaataggatctatacgcattcctctagtagttaacctctcagttgtagcaagagcttgagatagggctcgccaaaggaagtgttttaatttcggcatgattggcaaattccagattctggttttcaaatcgatcgaaccatgaggagggtttatggcgggaatgtttgtggacggatcatgagtaaggagccaatagccagaacgaaccgtatattctcccgttgtattgtaattccaaataattttgtctggttttttactcttagcaaggtagatacggtgtatgaatccatgatcgctttggtcgacaaattgagaaattttagaatcatcccagaagtagtaggagcctttacgttcgaacaagttattaattgtcatctccttatatgtttcttctgtatttaacggtctaggaggatgagagtccacaatattatccaatccgatacgaatattctgtccatcaccaatcaaatgtcttgttcctttttttaaaagtgcaatgccatctaaaagcgatgcccatccataagattgttgttttcttaccttagcatcaagaattgaaacatctttgaaataccgggctttcatgacacgtgcaaacagggagtttggatattgtatgagacgccatgcttgcttggcaagtaaagcatcattaaattttgcgagatctcgaaagcccaggccgccttctttttttgagtattggagtctcttccacgctacccatgggattccacgctggtttgaagctttttcccaccaaaaattcataagtaatgattcaatctccgaaactatacctttaggtaatttgaagcatgacatcgcatagacgggcattgccagggcgaccgactttagcataatctcttttcctgctggcgagaggaaacgtgcactccatgttgacgttcgtttttttactcggtcaattatatattcgaacatttctttctttttacgaccaaattgctcaggtaagcccaagtatttccctcctccaccctggtttggaatttccagaatttgttttagctttgattgtgttgaaccatagacccgcgatccgaaggttatcattgatttttgaacatttattttctgtcccgaatagtattcataaacatcaaacacatcctttagagcctggcaattccgtacgttggcttggcagaaaaatagagaatcatctgcaaattgtaaatgggttattgctggtgctccattgccaatgcgaactccccgaagatctccacttgacgctcttccatttattaggtgactaagaatatctccacataggatgaataaatatggtgacaacggatctccttgtcgtataccccgtgttggtgtaatatatccatgtggtgatccattaatcaagactgagtagtgaaccgatttaactgcagccataatccacccaatccatttgttgcaaaaaccaaagagtcgcattgttgtttccaggaaatcccattccaccctatcataagctttgctaacatctgttttcactgccatatatgtttttgacacgcgctttcggactttgagtgaatgcataacctcatgtgctatcatgacgttatcgttaatgattcgacccgggataaaagcagcttgagaatccgaaacaatcgagtttagatgagattttaaacgattcactaagcatttggagatgaccttgtataaaacattgcaaagtgctataggtctatagtcggagagtgttgtagggttagtgatttttggaatcatacatatgttagtatgatttatgctgggtttcataaatgatgtttcaaagaattttttgacttctaatataacatcgtatccgactatatcccaacaattcttataaaatcttgctgttaacccatcaggccctggggctttatcatctcctatttggcagatagcatcatatatttcggtgtcactaaactcttttgtaagatctaaattgactgtattagtgactgtggatttgaagtccgcaaagtctattggtgatacctttataccattggtgctaaagatatttgtaaaaaagtcctgagcgtggtttccaatttctttatctcctgtgaacatccttccttgatcgtccatgattgtgttcactcgattttgagaatatcttgtttttgtacaggcatgaaaatagccggtgttttgatcgccttccttcatccattgattacgactcttctgcttccaataaatctcttcgtcactaaaggccttcgctagtgactcttgaagttgtggaattagttgtctgtcaaccctccttgtactctccattgctctgtttaggctgctttgaagttttttgattcgttgttctgagtttaaattagaagcgtgtttcagtcttgccatggcttgtcgacaactactgatccgttccgtgataggtgtagaacgtgaattccggtttgtcctccagcttgtttgaacaatacgtttgaatgtcggtatgtcaattaagcggttatcaaaacggaaaagctttgatcgacggggaaatgactcgttgaagtgaactaggaccggtttgtggtcagagcccgtgaagtccaggaattctgtttcagcatatggaaatgttgcagtccaggctgaattaataaaaactctgtcaaggcaacatttgactgtgtgtgtatgtctttcccctacccaactgaatctatctccttttgatctcatatcttcaatgtcacaatgagaaaccatgtttctgaaatttctaaaagtccattcctctctcatgggaccaccaattttttcagcgttcgaaagtatctcattgaagtcacccactagcaaccattcagcatttcgattatctgagatatgttcaagagtttgccatagttgatgacgttcagattgagtagggtgaccatacacacaagacaagtagaagctcttattattaaatgttacatgagaatcaatgagtctttcatcctgagaaatcaaggataaagagacattgtttttccacataagagctaagccaccactccttccattagggggctgagttattacattagggaagcctaaatcatatgctagtttacatactttatcacactggtttaaggtttcaactaaaaataaaatatcatagttatacatacggaataagcgaaacaaccgcgattgagtcagcggcataccgatgccctgacagttccatgagatgatcctcatattggatcccttaggggtaccgggccccccgcgcctccgtcacgtccatcatgtatcgaacacgatcctgcagattcagtctttcttcctttcttgcaaagttgactcagaacgcccatttcatctgcagcttccacctgttggtacatttcttctaatcgaaccctctttctcttcatgaagacaaactcattttgtgcattgtcagaggactcaaggagcagatctttctcaaccggtgcgtcagttttaactcctgcaagtttggcgtgaaggtagcggagtctttcaactgtgaggtctgtgtcctcaatgacgcatggaaccgaataaccatctgaaagtttttgtacctggcgttgattcccctttgaaagcgaagattgaaggccgggaataagagtcgctggatccactgtctgaagagtatcagtgtcgcttatgtcatgttctttgttgtcgtcgtgatgatcgtcatcatcatcagcatcatcatcatcacttgtctccaccggatctgcccaataggagactaatattattttggggttctttttgtcagaaattacttggatttgttttttttttcaaaccacacagtaattaaaaataaaactttttacattggcattttggtcttaacagcattgtgattcttctcctgccaacaaaaattcatctaataccatcatcaattatatggattattacaattttgttttgtcatttcattctaaaaaatatgagtgatctaattcttgtaaaattttgatgtgtaacctgaaatattgatacactaatctatagccaattaaaaatgacaaaacataacattgggtaaatagtaacataaaaatatacatgaatcataaattttaaaagtatgctaagtatgtataagatttaaaaaaaaaaagattttaagagagttataacagtaacacacttgaaagccgaagttttgttcttccttgtctcagcgccgcgttttttctctcctcatcctctcgatgaattcctctcaagcttgcttcttccatttttctcttagaccaatctcgctttcgcatccctcctatgccttcctctcgaaacgtaagttttccttccccaaattaagtgcttgggaatcgaaattttaagagattgttgttacctagactagttcaggatacaatcgttagagtttcgttgcttcgaattgattaaaccctaatttcaaaagcacagacctgggtttttcactgttcctgcaaagttgataactttttcactgatactatctcttagactagttctcttaacccggaaattctctcaaagtatccaactttatgaacagaaacaattgttgaggcatgtgttttgaccttgataatgtttttgcaggagacccatttctgtgttctcaacccagaaaatgccttactacgaatttgaatatgtcaagaacgagacaagggcattctatacaaatgaacagaagacatcttcttatgaaagaaaggaagagtttttcgataaattattccgataagttcagagatgattctatgagtagcgaggagatgcatacagatgctttggatgtggagattattccgccagattcacaggacattcgtaattcacagaactctgctgtctccaacacactacaggatgataggccaaagtcttttagaaataggtttcttgattttgttcggataagttcagtactcaatactgcagcagaaagattctttaagagcgagataaggaggaggttgtttgtaacggctgttttgcttgtacttagccgtgttggatattttatacctttacctggattcgacagaagattaatacctcaagattaccttagctttgtctcgggttctgttggtgagtgttctcatgtcatttgagtcttatagtcccttgtttggttgacatttctatgtatttgtagttaacattttatgtttttgatagaggaactgggtgagtttggagcagagatcaagctttcgctcttccagcttgggctcagtccacaaataatagcatccataattatgcaggttaagatctctcctcgatttgatgtgtttgcctgagtctgtgcgttctttatatattaagattatgattgatgataaagtgctcatgaaacaccaggtgctttgtcacgttcttccatccttggtgaaactgcgaaaggaaggcttagatggtcacgagaagatcaagagttatatgtgtgtttagtttcttacctctcaagccgtgagatgaattcttaacatacaattactttgtttgtcttgtgacttttttgcttcattaaacaaagttactaaatcgcctttttggtcttattttattagatggtggctatcgtttttcttcgctatagtggaagcattagtggtggcttacacttctcttcaatattcagtttttgcagccactgcccagtaagttaattaggattcttcacgttcggggtatcaaaatggtgcttttaaattctatcatccattttgccacaactgatgctaaagtaataatgcatgcttattcagggtcaagcatgtgatgatgacatcatctctgctagtctgtggtgcaatgacaatgacgtggctctgtgatacaatatcagaatctggatttggtatttgattctctatatctctatctctataaccattggtagcttaaagtgatgctgatatggagtaattggtggagcttgctcataacctgtttctaagccttttacaggtcatggctcatctctgattatttgtgtgggaatattgacgggctacacagagactttacacaagatgctcaatcaaatctcaggtacctttggtttttcttactccacatttctcaaacttatggttagtctttacattagacctgcatgtcttccacatttcctggaggcaactatcattcgcctatcttctcaattgatttataaaaaaaggaagcgttcttctcttttgcaggaagtttctcgaactggttgccttacttgttaggcttgctgggcatttttaccgtagtaactatgttcgctgttgttgttactgagggctgcaggaagattaaactacaatattatggttttaaacttgcttctgcttcgaggtgatatatgtagctcagcatcattattttatcgaaaagattgttgtataattgccacttttaccaatatagctaggagtagattacggttaaagtacatttggatgcaacgtgtggtttactcatatttgtgtttatgctatgttttgccatttgggcagagaaggttctccaataacagaggtggagccgtacataccttttaacatcaacccggctggaatgcaacctgttctcacaaccacatatcttttggcattccccagcattcttgcaaggtaaattgcttgaagaacctcttactattagggtttaaatcattcctgtttcttacttctttgtgttattgttaccatctaaggctgtctaataaggtaatttattgtttttagtattctgggttcacctttcttgctaaacatgaaggagatattaaaccctgaaagcacagttggagcaccaccttgggtctattactcaatatatgcgtttttcgtctttctcttcaacatatttgacattgtgagtaaatccattacactttttctcagtctgaatttcagtcttccaatgaacattaaacattacatttaccgggtttcttgttttgttatgtaggccaacttgccaaaggaaatagcggattatttaaacaaaatgggggcgagaataccgaacataaagcctgggaaagccacaatcgagtacttaacgaagatacaagcatcaactaggttttggggtaagttaagctgtttcattttagatatattgcgtatatggtacaagtataatctctaaaaaccatttcatttggtttgatgcaggtggccttctgttgagctttttggcaacagcttctactgtacttgaccactatctacgcagcatcaatcaaggcttttctatcggatttacatctgttttgatcattgtaagtgttctttccacgtatcaatatcattcagtttagcagtattgatgtcgttgtgttaataatctctattgtttgtgtacaggttggttccattattgaactcagaagatcttaccatgcctacaatgtaatgccgagtttaagcaaagcgttaaagagatatggcgtataaagggagattggagaaacagaagaacttatagatatattattgtcgtttaaactttagaagtttctgtagctcttttgattagtagattaggcattagataatttgtattaagaaccaaaacacatttccatcataatattagaagacttaaaacccaagggccaagtatcacaagcatttgcggaaagattatgcaggaatagtcgaacttcataaatgtctgcaaatactccgagaattattgaacttgaaactgatttcttttcttcgtttgtccagaaaatgagagtcaattgatttagttgtggcatatttggcactaataggagccaaagttacatttgattcataaacgaaagtccacaactagtcgcattaaagaaacaagaaaattaattgtgtcagttttgcaactcgtgatgacttaagcctggaactttccacgaattagaggatccagaagattgcctatgacattataggtagcttccgatggatgaatcgagtcaaagaacaaaaactccgaccgattttgacacacaggagaaaaaacattacacatgaagctcgtctccaggaaccctgttccacaacatcctctcttcgtctctttgaaccctgtttcaattccacacacacgaatcatatatatatatatatatatatatatatatatatatacaaataagagaacttgtggaacaagaaagatctttatgtacataccgtatttgctagggttttggatcatctccatcataggattatagacatcggcgtaaaggaatttgcttcctggaagagatgcttcgatttggggcaagagattctgaagtttctcattgtataaaacagagtctttgttatggtgttccaagcagaatctaaaaatgttgcggaatttagcagtcatatggatcggtaaacaccccattggcggtaaacctccaaccaaaacattccggacacctaaactgtaaagctcctgcatatacaccggagagattaacaaaacaaacaaattatcataaaactttcagtcactatagtctgttccaaaaccctaattgtggtaatatatatatgaagaaatatcttagacgttacccgcacgaaattttcaagcctcttaagaataaagtcttggtaaccagaaatgaaaggatactcgagacgccttgagggaatttcgtaatagttcaaaatgaaatcgttaggccctgcactcacaaccacgaaggcattgtttatgatctccatcgctttcttgtctcccacgatacctttgagacgagcaatgtaactcttgaacatgtttggttgttccgagacacgaatggcttgtgtcgagagactggtcaggtcgtcgtaaccggcaccagctgatgcgaaacagactccggttagaatgtcttggtcggagagatttggttgtaagaaaggaggaataaactctttgatgttgagtttggttgcgattatgtcggagataagttttccgtttgagaatcttccgttagcttttccgtctggaagatccatgccgtaaggaaagtgttcagctctgaagattgttggtaaagggtagttgttgtttcctgtatcgacggttgaatcaccgaagattagaatcgctgggaagagcggcttcgttgttgcgtttgcggctgcgttgcagggcgctagtaatgttgttgcaatgaagagagttaaggttatggctttagaagtcgacattttttgtttttggtggatttgaagaaatgttgttgtttggtgatgaatttataaggtgaaatttcttttgttaccttgctggctttgttgagtttgtttttcctttttaagtgactaacaaatagataagtcaagagctttgaatcttttagtttaaatagagatattgatgagcttttcacccaatgattaaaaataaaactgaaaaacaatgctgttatctttgaaaagctgaaaataataataattgttactcaacctaatcatgtaggccatgttaagaccatgatccagatgattttctttgattctgcggtataattaaattagattagctggtgcttattttttttcttattttttttgaattagatgatgattattgaaatatttttatttttcaatataaaatatgagatcattattgtaatcttcgcctactcggttgtattttgggaagtagaaatctcaacgacatgtgtcttttgcaaacatattgttcgaagtggaggttttgaagagttcttaacgatttgtttacttccctttttgtgggatctgaaaacaaatagtgaaagaagcttaaagtgtgactttttttggttgtatacttttgttgggagatcgaccaaaacttagttcgactgatttttatatttgaagcgggtcttcactttagtttttcaaaaaaaatgttgaatatttttgttgatcaattctaaatactcattacactcccaagaaacagaatttgtcagattaacgtgcaccaaaccttgcgaccctataaacattatctaaaaccaaagtcaaagcaaaaagacatttgcatgatgctcgtcttttattaagacgaggccttgatatcttagaaacctcgtatgggagataaagcaagttatgtttagggcaatttcatgagaaactcacaaagtttttcaaacaaaaagaaattaatattttattataatttaattatatgattgaaattttattttaattaaaatcttgaactaatagtgagaagagaaatatcatcatgggttgtagaaagtatctcaaagtatctcaaagtttctcaagtgagaaactttctatactctctctcctttattttcattatttttatatttttaattgtgaaaaactcttatgagaaacccccaataaagatggtcttacaagaacatgaaaccttagcatttacatcgtaattagacgtcttgtgggtttgaaatatcttcttgttagatacactctgcaatagaagactaatatggattttggaaaccagaataaagagaaagtcataaagtagactgataaaaactaaatatggaaagaaagaaagattttgattcaaaacgctatgaaaaagcttcgagtcttttcgtacatcatagaaatttggaattgttttatagaagagataattagagagtcggccaacttcttatatatgattttgtacctttcaattaaagtaaaagtgggtcaaattctatacaatctaacctacatatataaaacagtttggcaaattaaaatatataaatctgtcaattttaatggcaaatatttaaggccaaactttccggtcttatttgtatcctccttgatgtattaatgaatttttatttcaagactatatagttaaagatcacaatgagtgacgaaagattgttttagatgttaaaaaaaaagtgaaatcaattcatttacttgtggcatatttggctaatttgaaagcacaaatatgagccaaagtacatttgatttaaaaacaaaagtcgacaaatagttgcattaagaaacaagaaaaaaacattgtttcagttttgcaaatcgtgatgatcacttaagcctgaaacttcccacgaatcagaggatccagacgattgcctatgacattataggtagcttccgatggatgaatcgagtcaaagaacataaactccgaccgattttgacacacaggagaaaagacattacacatgaagctcgtctccaagaaccctgttccacaacatcctctcttcgtctctttgaaccctgtttcgattccacacacacgaatcatatatatataaacaaataagataacttgtggagcaagaaaaatctttatgtacataccgtatttgctagggttttggatcatctccatcataggattatagacatcggcgtaaaggaatttgcttcctggaagagatgcttcgatttggggcaagagcttctgaagtttctcattgtacaaaacagagtctttgttatggtgttccaagcagaatctaaaaatgttgcggaatttagcagtcatatggatcggtaaacaccccattggcggtaaacctccaaccaaaacattccggacacctaaactgtaaagctcctgcatatacaccggagagattaacaaaacaaacaaattatcataaaactttcagtcactatagtctgttccaaaaccctaattgtggtaatatatatatgaagaaatattttagacgttacccgcacgaaattttcaagcctcttaagaataaaatcttggtaaccagaaatgaaaggatactcgagacgccttgagggaatatcgtaatagttcaaaatgaaatcattaggccctgcactcacaaccacgaaagcattgtttatgatctccatcgctttcttgtctcccacgatacctttgagacgagcaatgtaactcttgaacatgtttggttgttccgagacacgaatggcttgtgtcgagagactggttaggtcgtcgtaaccgcaccagctgatgcgaaacagactccggttagaatgtcttggtcggagagatttggttgtaagaaaggaggaataaactctttgatgttgagtttggttgcgattatgtcggagataagttttccgtttgagaatcttccgttagcttttccgtctggaagatccatgccgtaaggaaagtgttcagctctgaagattgttggtaaagggtagttgttgttgcctgtgtcgacggttgaatcgccgaagattagaatcgctgggaagagcggtttcgttgttgcatttgcggctgcgtcgcaggacgctagtaatgttgttgtgatgaagagagttaaggttatggctttagaagtcgacattttttgttttggtttttgttttttagtagatttgaagaaatgtgttgtttttgtggtgtatttataaggtgactttttttttgttaccaagctggctttgtgaggttgtttttcttttaaagtgtgtaacaaatggatgaagtcaagagctttgaaccttatagtctaaataaagattttgttaagatattgatgagcttttcacaaaactgaaaaacaatgtggtcaaaagaaaataaatttcgttggtcgagcaaaggaaaatagaaaagcaaacgtttttgtttagcgtttaagaattgataatgtgaaaaaacaaatcgataaagaaacaaacaaattaaaccaacatatcttgattccaactgaactccaattctgaattctggtttaagaaaatgacctaaacttaagctgagagtgttttgtcgttttcttgctaacaagtcatattaagattgctatatttattaaaatttaacattaacccaaaagaaaaaaagattaacatgtttataaatacctgaaccacaaaaaaaaactaataaattctgttctttcatatgatatggataacatttaacaacatactataacatgttccagcatgagatacttaacttactaaacacgaatctagagacagttagaacaagtgtctagaaaaataatttataccaatatctgaaaccaaaatcaaactctctgaagtaggccatacttcttctgttcgtgtggccagcggcgactccgtgcatagttttctttagataaatccaatattgataagttgaaaaaaaaacaatttgaaaatttacactttttaagtttttataaattaatgggacgattttaacatttcttgatgaccaatgacaacattgcttgatgttgtaaacaatgttatgaagaagatgtcaacttcatgtcttctcaggtcgcaattcaattttatatcatgtaaataaatgggattactagtgatctcttctgcaatacactttttaatatcagaatataatttctcatgttcatttgaatacactttgttttctccttccaattaagtagtatacaaattttcacaacaatactttatgtttctcgatgtgattcaatgtttatgcaacattattattagtaaaatagatgtccataaattaaatagaagttgaaacttgaaagacaaaccgagacgaatcccaaaatggaaacccaatgtttctcgaacacacgtttcatggaatcattgattcgtttgcatatggccccacaacaaagatggcatatatgcaataattgatgcttctacgtcgccacttttctaagaaagaaaccatctcctttatataataatctttcctcaccactcaatatgttatatccgataacaaaaaacaatcacagagagaaaaaccaatggcttgtattcacatcgaatcatcacatccacctgcatggaagacacactctgtccaagagaacaaaccagcaaatgctgatgatatatcgaacacaaccttaccagaacaccacgacggtggcgacgggggaatccaagaaacgtgggccgcgattggagattctggcggcagaggaggaggctatttcgccggagagagtaggaagaagctggagaagaagaagagccaagtgttgcttgagggatacgcgttggatgatcaagatgatttgacgagagccaagagtttgacggatgatgatcttgaggagcttaaaggttgtttagatctagggtttggttttagttacgatgagatccctgagctttgcaacactttgcctgcgttagagctttgttactccatgagccagaagttcttagatgataagcaacaaaaccaccacaagtcccaggaggaagatgattcgtcgccaccaccgaccacgaccgctccaattgcaaattggaagatctctagccctggtaaatctctaaatctgagatagatttgagtcttgtgattatgaagaacattttcttgacttgaatgtttgattgttgcaatttttgattcaggtgatgatccagatgatgtaaaagctagactcaaatattgggcacaaactgttgcttgcaccgtacggttgtgcagctgaactagaatcgattttcatctttgaaccagagaaagaccgtctttgcaagaatgaagtctctgccattgttcgctgagaatagacctgcaaatgtgtctgtggataaactggtttggcttttactttaaaattctatgtatgttatgtgttgtagtaatcttaagtctttatgattttaattgtgtcaagtgaataaaaaaacttcaaattctttgtctacagttctcctgactgttgtgattgagtgcaatgtggttgcttaacatatgacatctgaattagggttcttgtcctctcatatgcagtgatgagatttagacacagaaatcaatctccaactgtttttttgaagacctctgtttttggctgaggtaattgatctaactgttcatgttttgatatcttctgttctttcatgatcttcatcttgtttttgtatcattggtaattaggcttatatgatgaggttttgcttcaatcacaagatgtcaacaaagaaagcacatgacccttcttttatgttcttttacatgtgattcttatctttttgtcccgtggctaggaaagaatcagaaactttttgtggtcataagttgtgaacacacttaaacgtgtcgtgtacgatagggcaaaaatcctttcacatgttctttttacgtatacaaatgtctaataatgacccaatagaatttattactcaactttttatgatttgaggtttgtttgaacgagagtcacatgataatatatgatatatcatcccatgaaaagacatcgaatacatcaattatttaaaacaagaatgatagaattcaaagaaaataagtttgcaatgttgatgattctaagatcataatttggaccaaacgaaagttcttgaaacttcttcttctggtgattaagaagaggcctgtcccaacgcagtttgaatgtccttctgcataaaccgaataacaaaccgtaataagatggttgtgtatggatggattccggtttaggtgaaaaccaggatggtatacgtacctcgaattgaagaggagaggttctgggagaatatctctgtaagaccttgccatcaggagaaaccaagaatttggtgaagttccatttgatagcatcaatgagcaaacctcctttctctgctttcaagtacttgtataatggtgccgtgttcttaccgttcacatccacctacattgccgtcaacatttccgtcaactatttatatatactatttttctttccctattagacaatcatcattcctcattaagttacttacagaaagtcacatatccttaatgttgtaaagatcagtcactagtaaaacatttaaccaatgaaagagagaagtgtaataaaaagaaaaatgaactaccttgtcaaagatggggaattcagctttgaacctggtgcagacagtttgttgaatctcttcattgtttcctggttcttgtcctaagaactgattacacgggaatgctaatatctccaaccctattctcattttttacatttatttagttatagtgacaagaattaaaatcctaactaaaaccaggtttagttttgtgggagctagctatagtatataaatcaaagaccttgctccttgtatttctcgtacagaacattcagttccttgtagttcgcatccgtcagaccactgcaagttaatcaggaagtttagttttgatttcatctatttgattgactttaagcaaaatcttaaatttgaacaaacgaagaccaatattactcgaaatctctgtttatattttaacaaacctatgttgcggttaagaaaaaaggacaagtactaatcaaaccaaactgaaccggattgaacaagtactaatttcacaagatccttgcaattatattttttaatctggtagatcacaaatacttttttttacagatatcaatgagcatacaagccatacaaccaatacttaaagttgaacataataatccaaaaagtgaaatcaaacgttgcttcctttcttagatcacaaatactatcttgtacaattaggcaatgaattctaaccaacaaaaaaatgaaaaacagtgaaaagggatttttaccatttggaagcaacgtttacaaccaaaagagttttgcctttgtattggtccaaactcacatcgttacctccgatatcctgccatgttcatgaataaaatataaacacacataatatgttttctttttataacaaaccttgaaattgttcatctatattcttttgcctgagatcgaacattagaaattccggtatcgtaatttcggatcaaaacaaaatctctttctgtttatgtgtattaagaatctaagactaatcataatagttatgaaaaaaaaaaccctgataatttatgaataaaagcaagaaaaacgttgagaggaaaaaccttgacggtgaagtcgtagatagactttggagattcatccgccatttgcagtgtcgttggtctctttctgagttcttagttatgaacaaagaagagaagaaatataaatctttttgttaacaaatattttgtgtgtatatatatggttgataaatgttataagatcagaatgctttaaatgacgaatctcttgtgacgaatggtggggtaagcatccacgacttcatattgattgcttacccttctcatttttatatttttcttatttctgtctttcattgattagttggtacatgaactcaattccttatttaaaatcaagaaatctcaaatatataactctttttttttttttctttttttttttgcgtgttgtgtcgagtatcaatatttacacggaatttatttaaatattaacgtaattggaaataaatttcactacaaaaaaaaacatatcaaattgccacctttcatattttccaaaacgaccactacaattgactttcattttagatattaacgatatgattaatggaaaaaatctgtaataggattcgctgccaattatgctttccaatgtttgacctgatttttcttaattatagcttgttcaaaaagcaagaaaattataggaaaacatctagaatttatagatactgatttactgcaagttgtcacgtaaaaaatagtattttatcaaaatatcattgggtttttggttctcagacttgagacccaaatcaagaaagttattatatttactagattcagttatatttccctgttaaattgatatacttaaaagtaataaatcaatcaatgtgtggcaaacaaacaaaaaagtatacttttgctcggttgaataatttaaaagttatatacaaatttttcaccaaatatatacaagtacataaagtcggaatttaaaatggaatgagaacaaaaacatatctcagaatctaaccaccggacctgaaaattttagtctataggtcttatcaagtagttggaccgacttaatagacatttgaattactagtactattcaacaacatgatagaaaattattaataatactggtctctagtgattatacattaacaaaataaatggagaggataaagttacttttacgtaacgcaagagaagttagcagttggtcggtgcacaggtatggtgtgaatttaatgttttacatatctatctatctcccttctctcgtcttccacaaatgtatttaacatacaaaaccaataacttttctaaaatcttaacaatggttgacatacatgtgaaaaactaaggtataacacatgttgaaaagaagtaaagctgtgctaattggagattaagaatttgcaataaattagtcttacaagtgaagtaaaatactaaaatgcagctgtttatgagtagctaagaatgtgtaggtgttcttcccagaaacagcgttcgatgatgttgcaatgatccacgaccacttctccttccagtttcttccctgaaactactccattctcagcttcctgaaaaagaatattcagacagctctacaaatatcaagttctgcaacggaagaagatcttcacgactgcttgatgagtttgatagaaacagtaagaaacctcggcaggtagttacatttcaggtttggtatatggatttagccatttacgagttaacagccaaaggtttgagtaacttaattgattcatacgatacgataagagcagaaccagtttggcacttataaagtttctcagccagtccactgtatcataatctttctatgcatagatttaaagttaaggcaatactaacctttagacggaaaaccgaagaacccattcgaaagattacaggtaatgagttgtactcaattccaaattgacggctaagcagctcatttttctctcgtgtttgtgtaccctgggaatgtcattcacaaagagtaagataagaaccattctaagcattgactacttgagaataatttttttcaatccattataacaaagtacctttaagtaatcttgggattgagttttgttttttccagacttaacaagcatccagaaacatgtattgtactgattattgatgtggcctgccaaacgaaaaacaaagaaaacataagactactcatctaaaattttgcaaagatatagacgattccaaataatttatcacagtgttattatactaacagtcaacttgtctccacgccagataatccaagagaatattgtatgttggatagcatacagctcgtccatcgaatgatggagggtacttcaattctttgtgagggaaaaattctccccattgtaacacatatgtggatgtaaagaaggatgcgactgcagatattatcttactgtaatgcaatactaagtattaagactaaggatatcagggagatacggccaaaagtgtaaggaaaaagagaaatttagtttaacctggattgtcttttgtagagctcagattctttcttcaaaacaaagctgtaatcgatgatgaacttaattaatatctaaattatgtaaagctgagataaacaggttgcgagatggacacctatactcatcactgacaccataggcaaagtgaatatcctcaaactcctcgagaacagccactgcacatgaattcataagtttcagagcttgctcatcatttggcttctcaaattcatgaacgtcagaaaatctatcaaaatccaagcaagctccatgagtcgtaatttgcaacacagaagactagtaatcactaacaaaatgacttctttctgaaaatgcaagttcagattcaataatcagaatattccctagacaaatgcaaccacaacagaacataataaaactgaacaggctagcctagctgaatcctatggagcgcaaggattttactagtctaaggcttcaatgcagtaaaaagactgacaaacttttacgaaataaaggtaagctatagacaattacctgtgaaagtgacagccatcaatcctaaccacgacccaagttaaaggtaacaatttgttctcaaactgaaacgacctaataaaatctggttcaatttttccaatgtctttcgtgaagtggccaagatcattatatagagagggctgctcattccaaaagcttcttcctgcaatattctctgaatgtacaaaaacagcctttctcctcaatctttttacaggattgccattttcgtcatgctttacagtttcttccacctgaatcaagttaaatgaaagtgtgttattggaaatttacaataagtcttagctacatagcatcacgcaaatttatgatgaacatcaagaagagcagctagatacatcagttttaaacctgaacatcaactaagctgaagtaatagtcttctacacattgctagattttactagggttcagacaattcaaacttacaaattacaatgcataagcctaaacgtacatgtgcatcaacaatattgtcaacaaactcaggttactaacattcttagagactcaacttaaaactggaagtctaaatacatacacaacacatagcaaagcaagtgctctgtatataatttctaacaaaagatataaattatcacctttttcttgaaaagacaagatccttggcgaaacaattcaggaagcgtcttgtaattgataccaaatttctgaaagagaagctcatttttctgctgtttttgtgtatcctgcaggcatccaatggaaatagaaatcgtgtgttcaaaccatgtaatatcattactaagcgtgaaacttggcttaagaaggtaaagggccattttgacatctgtattagaaaaaaaaaattatagtcgtagtgcagacaaaaaaacattgatctctgccatagaaaagcacgaataacacacctttagaatctcttgggtttcacttacgctctttccacttttaactaacatccagaaacaagtgtcatactgattgttggcgtggcctgcaaccaaaaaatgggtttcacttaattcacgaagatattcacgccaataagtagaactaatatccggaaaaacaagaaatcaagaataagtgtcaagtacaatatttatgttgtcagaatgtcttacagtcctgttgtctccacgcgagataagcctgaagaacctctgctgatgcacaacttacaacttttgaactgaaggacggagcatataataattttctttggggaaaaaactctttccattttgttacataaactgcagcaaagaaagaagctaccaacgacaaaatcttactgcatataaaaaaaaaaaacaagaaagtgaaaaacaatgagtcaatcagagaagaaaaaaccacatatcattgaggaaaaggttttcttcaagtaaattcactaaaaatatggaatcaactttaatcgaaaaaatacctggctcgtctctggtagaatcttgatgttttcttgaatacaaagctacaaaagacatgtaaacatataaatcttgtacaagatacatagaggtgaaataaataaagtcaatggagtgtatttaggacctgtattcgtcactgtatccataagcaaagattatgtcaggaaactcttccaaaaccgcagctgaacatgaattcatcaaattgagggctgtttcatcattaggcttctcaaactcatgaacttgagaaaatctgtagttatcaaacaaaggtaagcaggtgtaagtaaaatgccaaagaaaaaaaacattctttcaggaacaatgtcaaatcatgcttccaaaatccatcaaagatgcagcctttaatcattattttccctcaattattccagagatactacaatctacacaccatcaccattgacattggagtagtgataaatttcatatagatcattatattatacacaatctgtaaaatttacctagaaaaatcacgaccatcgattcgaacaaccatcaagttaggaagcatgacttcatcctccaattcgaatgatttcacatactcgtatttgctattcgccatatccctcaaggtttcacgaaagttttcttctttcttctttgcttctacgctatcgactttgaaactaccagacacaaaaaaaactgcaatcgaacaggatattaaaccgaaagctgagtcgacattgctctgtgaaagagaaaccaaactatatgagcaaagacggtttacttcacataaggagataaaaaaatggcagtattccttaccaatactagttcaggagcatataagattcttaatgcagtaccaataaagatcacaatcaattcaggaacatataaaactttccaataagatcattttctcaagttcaaaaacaatgaattcttagctagggaatcgtgtgcaggaaagtacagaatttcaaatcctcaccagtaagacaaggagaattaggacaagttttaataccttaagacaaatatggttcgagagaagcgacaacatcaacaagtgaagggttcgtgtgaaatcataaaacttttgtgtcaaagcggaaaataaataataagagcacgaagatagttcttctatatctacattaactcttactaccacacagaggagaggcgaaagtaagacagcaaagaggagcttaagaagaaaaacaagcaacgaagctttagatcattgtttaggttcatttatctatcaccattgtctatttagtgatctctgagctaaatttgattttggaagatgaaatcagtggcaataaggtgagagagattagtggaactaacataagagccaacgatgtttatgaaagatacaatttagtattcctattgacaatcgaaaatctaaaatcatctcaatgccacggtcacataataaatagatctgtatgtttctcatcatacactaccaaatactataatttgttcaaacgtttgaatcaataacaagaacatcaaatccacaactctaaacacttcgaattgacaaaattaaaaggcaacaaagctgaattaagctcgattgatgaagaaatatggaaatggatagtgagtgattcttaccttgtaagcagttgcaattctcagcttcctttctaacaacgccgacggaattgatcatttggtttcatagccgtcgtggtgtgagagatgttgtgaagaaaaaaataaaacttgattttttttttcctttgttaaaattaatcaccctatcacatgttgccacgtatacggctctctcaccctcttaaaactctctgaagagagtcggctctgtggttttttatcagtttagatttattttaattactataatttaagagagtcaaccaaggcaaaagatcaatttctctctcttctctctctacgattattcagagagaggaaacatgatctttgtttctccatccagtttgtttactggttttgtctctggtatggtccagctttgtctacggcgaggttcggctttgtttcggctatctgttgccgctttttgttttttctgttgaataaattatgcgatctatattagtgttgtggttttaggcgattcgtttttgcctaaacacaattctctccaacataagattgatgaatatgatgcttgagttcctgaaccgttgacgtttaatcgggaagattttgaagttgaattttcatgaagttgaagatttgtttttagagctttggaattgacaattgctatcaccggattcaacatgcatatcgcggtgttctgggtttctatggagtcaacaatcttcttcggcggcgaccagtgattctccgatcttcttcttctcacgtgtcttcagcacctaaccttctcatgacacgtgttttaggttctgtttcaatgattcttctttcttcctgatgcggtttcctacttgggcttcatagttgggtttgaaaagtcttacacttatgtttagttgaatttggctctgttgtttgtctcaaattttggcttatgttgatataataaagggaaattcacatttataaccatcaaaaaattataaattgagaaactaacctatgcaaaaaaatacaatgatattaagtgtataaagtgtaataatacaataatatcctcaccaccataactattcacaccaccatcccagcccagaaccaccaccaccaccaccaccggaacctttgccaccaccgctggaactcactcgccggaaaattaccgccggaaaccaccgccggaactccctcgccggaaaccaccgccggaactccctcgccggaaaccaccgccagaactccctcaccggaaaaatcaccgctggaactccctcgccggaaaccaccgccggaactccctcgccggaaaccaccgccggaactccctcaccggaaaaatcaccgtcggaactccctcgccgggaaaccctcgccggaactacgttgtcggaaaatcaccacctgaacttcttcaccggaaaactctcgccggaaatttttgccggaattccatcgccgaaacccaccaccggaactcccttgccggaaaaccctcgccggagctccgtcgccggaaaccttcgccggaactcataccaccaccaccgttggtcattttttatacccttcatgttagtttcttaattgatacatatagtatgctatattcttaattttttagtagaaaagtgttattcttgcaaatgaccttataataaaatggacactcttgtgaaaaaaaaataaaaaattgagatatgtcatgttccaaaaagtgatactgagaccatatctgaactcttattcaaactgttaacttcaactgtaacatgaaaccatgtcagttgtaaataaaaaattgacagaatcaaacgagtgatgttaacgtttttttaggaggtttcagaatacctcccatgtttagatatgtttcttgttgcttgttctgttctgaatccttttcacgttgtaggattatcatgtttttgcgtttggatgagtcgccaaggtgcaggttattgttggaatccctatcctcaacacgtcttgatgattctcctgtttcataaacccgtctgactcctggtgtgggcgcagcaacagaggattgaagtctgccaataccactttgagtagtaggatgagtgtaaggctggaaggctgcagttcttgaagatgagaagtagggagtagcagcagctaacctgattacatctaaaccggccaaatttggttcctttttacttttttagtatccggtcgctacttttggttgtgactattccggttcctcttgaaattagtttcctaaattaaaacgttcggaaaaattctaaaccggatagccaaaaatcgaagtatgccaagttttggccacccataatttcgaaaatacaatttgtcaattgcaaagcatcgttgcctgagtctcccattagccattagaccatttcgattttgcatacgcttttcacaagtaaattttagaaatgaacaaaattgcaactaaactgaaatggacatctccaaatgttagaatgagttccaacttccaacacactagtttttgtgcttatggatctgttatcttcttattaagcctaataaactaccactatctaaactactataccctaccggacactgtaacaaaacctctcttaatagctcagggcagataaacatccgatacctacactgtaacaaaatctgtagacgattaagagcgcaacataatacgttttatgtcacttcttagaatgatatagtaaggcagagatcctcaccttttcccttctgggacatacacaaaaataacttctggcaacgctaacagctcaactcagcttgtattttcttcttttactacacttttaagtttacactccttctgtggattttttcgtttcgcttgaatatgatgcacaaacgcagctactataacatggagctttgggggaggcttgcttgttgaagagacattatgaccagcatcctttaaagctttagccacatgcttttgggctttctggaagtgtatattacacagtgcaggaacagtcgacgcaagtgttggttttccacaaagtaatggtcctgctggggctctgaatgtacaatggaaacaatgcagagttaggtgagaattgcttaaattatcattatatgctaattacaaaccagcatacaaacttacctatatatgaaatctaggttgtaaaaactcaaatctgaaacttggtttatgttttaatactaccacaatgggactattctaacacaaatacattttcaaagggtgatatagttatgctaatactcatatcctgactattttacaaatacacatcaaaacagacaacttcaagcatctgcgtcagttatgtgtatcaaccagaacaacaaagcacatagagcaatattttaacacaaggcaactactgaatctataaatgattaccgacgatcactatctcgatgtccaaagctaagacttctcccaaaccctatgaaaaactttgaaaaaaagtcaagtgtcaatcccaaatcctttctgcaaacttgaaaaaaaaagagaaacaatctcttggctcactacataacacaaaacagctttgcagtttcaattcatcatcactacaacatcttcaccaactataatatgcaaagaacacaacttgaagcatcaattactttggtttatacgagaattttaaaaccaaataaagggaaagtgaaacaaaccgtttaatgacgtttgtgcaaccagtgtagagcttctgcttactatccttgagaatatgcaattgacagtatttcgtaagcgccatagctttagctttgcatccatacatacaactcccacaattactattcgcatactgatcactcttaacaccatcattgttagtaacattgtctccactaccttcaacagcatcaccaccatctccgatatctccctcttgaccaagcctccgtctcttattcgattgattattttcgtctttaaactgactaatcccatacttccaccaataatccctgtgttgtgccttgacatcctccattaaagcccaataattgtctctataacacttggccagctgcttcaggttgtgtgatcggcgtttgagaagctccgaccgggttatgtgactggagcgtgcgaggatttcatcttcttgtgacatcgtaatcggtgaattcgatgtcgacggtaagccgctggtgctagggttaggatttaaggtagagtttcgaattaggggctcggctgaggtggaagccactgcggttgttgatgcagcgccggaggaatacggaggccgtggtggtttcgaggagaaagggttttgctgaatgttcttggaagctgacgccattgccgtcgtcggaaaatgacagagcttcaaaatcagatgttcttgtcgggaatgaaattattaatttttaaaaaataatattagtacttaaattttaaaatatattaaagcccataaaatgtccattgggctgacatattcaacaaataggcccaaactcaattggatgtgagacctaagtttctgaattaggtcaatataaatactaaaatcatatctgataacgaacacgagcttaccgattctcttcgtctcaacatttagggtttcagagatcggctgattttcacatccacaagtatggcgactcaaatcagcaagaagagaaaggtgaattgtgatttcattttttgttttcagtggacttctctagctgtatcgtattggaactgatctggttactgtgtttgtagtttgtagcggatggtgtattctacgctgaattgaatgaggttctcacaagagagctagcagaggatggttactctggtgttgaggttagggttactccaatgaggactgagattatcatcagagctactcgtactcagaatgttcttggtatgtttgtttgatcatttcttctctctttcgattttgaatgtgtttcgagatctgatatcgaaaatgttgggttttaggtgagaaggggaggagaattagggaattgacatctcttgtccagaagagattcaagtttccagttgacagtgttgagctctatgctgagaaggttaacaacagaggtctctgtgccattgctcaggctgagtctctacgttacaagcttctcggtggtcttgctgttcgcaggtacgacatttctctagtatgtttttgtgtattctctctcaattgctgttgttattgtttagcttacttggtcctaatagtgaaatgtataggatacaactgtaattatatttctcagtggggtttctgtaaatgcgcactctttatagattttgtgtaatagttatgtttctatctactgaacacactgatgatacataatgtgtcgacaaggctattgcatctcttttttcacttgaacttctcatccttaatattgcaatggtatatttgatatacagggcctgttatggtgttttgagatttgttatggagagtggagctaagggatgtgaggtcatcgtgagtggaaagctccgtgctgcacgtgctaagtccatgaagttcaaggatggttacatggtttcatctggtcaaccaactaaggaatacatcgatgctgcagtgagacatgttttgctcagacaggtatgctttctaatgagtctcttatctaccatttagtgagtaagtataccggctttgtctaatcttgttggttcaatccgtatttgcagggggtgttgggaatcaaggtgaagatcatgcttgactgggaccctacgggcaaatcaggaccaaagacaccattgcctgatgttgtgatcattcatgctcctaaagatgatgttgtctactctgcacctgctcaggctgctgctccagttactcttgtgcaagaagctccactcacaaccgtagattaccctgagatgattcctccagtggcctagagaagaccttttttactattactccatgggattttgttctttttgttataacttttctacttttgacactctctagtcgtatctcttatatcctccaagcagacaagttttttctcatgttgtttcttaacctatgtcaagttttctggaggttgaatgcttttagttccatgatttttttgttcttaagactcgtaataagaaaaagaatgacgacaacaatgcctggtatttgatgttgttactttgaattatcattttgctcagaacactttattcgaaaataacaaaaactaaaatgtttggagctctcattatcttttacggttttacaaaaggatagagctcgtacctaaaagtacaactcggattcaaaactcttcctccttgtttaccgttgcagcatctgggaagctttgcaataatcgaatccaaacacacactgcaatttttaactgataagtcttgtgtacactgcatcatcccatacaatttcgtcgtcccgagactttcctcccccgctgcatacatgtagtctcttgtgtaaggctcttgttctttacgaattgctttctccttgagcttatctaggagagcctttgtgttcttgttgaacaactttttattgccgctcacatctttggcattgtgcaaatacaaatagtgcttgaaatcaatcttctcgtaggtatatatctcggaaatgtagagaaaacagttgtcgtaccatattattctccctctgttgttcggacatctcctaagaatctgtcacatatttacaatatatataaatatgttgggacatatttcctaagaaatgctaagatataactaaaactaatgtatgcatgcatttatatatatatatatgtaagtatatgggacagctaaccgataatattgtaatgacgttaccccagagaaggcggtaaagaggcaagagcggcacttggattcggaggcatctccccgacattgggccttgatgtagtaggtactagaatccgcaccaccaacaccgtggatgaaaccgtagtctagaatgttagacatactgtcgagatgatctttgagtctgctctcgtatgaattctttgccttgtattttccttcactgttgatgcatatgtgttgcagatacgaattggtctgatttagggacaaaacattgtggataaaagagaattgcatggccaccacgaccaagatagagatggatacagaggaagaaaacattgtgttagagtgtttttatatttgctcatttcagtttgtagaaaagaatgactctagtcttttaaatgacaagagagaggagtgtttgggtgtgagacttggtatttacggcgagggaaaagaaggacccatgaaaaggtcaaagttgaaaagttttgaaacttttaaaatctgaatttactctacattaaaatttcaaatttgttacacgttagctatatgcctccatgaaaatcaatatacatcaaaaataacgtaccagccaaatgtatagtggagcttatggtgatatacttgattttatgatgattgtgactaattttggtttaatatagacatcatgatggagatgataagaagaaaacagagaagcaaagaagaagacatgaagttatgttttaagctaatggctttttatctgatcacagagcagagagttcgacttcttgagtggaaggtcgataagctacgaaggtgctatcagttgaaaaggagcctggattgaaacatatttctcccccaaatttgcatacgttttgctcactcttgtcacctaataatatctgttttccaaacaacaacaactttaacaatcctttttctttttaaggcgggtttcatgcttccaaactaggtggcattcaatctttattaagaagatttaagaatgtaccgtgtgtggagttggatatagtcgaaggcagtggacagtggtcatagttccaaatgatgtgttgaaccaagagagttagataacatagatggctctgatgaattaatgtggagacaagctgaacaaacacatttcacaagtttcagattaattcgaaaaactgtaaaatcagaagttggaaaataaaatgggtcattagtttcttttcaggaaggggttattaagcatgaacggctcattctgtatagaagctcgtgtcggaagaacacaatctccttgttgtagaactttactctgcattttacaaatacaagatcatagctgcagcttttgtgttcataagactaataaccatatagatgaacaatggagagttcacatgcagtatagaaaactctctggattggtaataacatctcgaagctcttcggttaaatactctggtaaaccgcatcttggcaagactgtcgagagacctgtcacagataatgagtttttattagtcatgtctcctcatggaccctggctttatttattggatagtgaaggagattgtacatgcgtcatggactcatgtttgctattagccgtggatgatttccaatcattcttccaagtttatcaaactgctgcctgaaaaatgaatggatgcatgtactcaacaattatataagattaaagttttgatgacaatcgaggagattctaagcacattaatgatcccttaccaaatgcttgaataagagccaaaagataagttgcatgggcgagaacaaaagtttcccatgaaaacaaacaaagagggcactatctttacattttcaaaaccatcaataacgtttccagcttcccaagaaccttcattatggacaacacattttggccaatcaagcaatgttctctaagcacaaagattgaagctaaaatacagtaaattagtactccaaatcacctcttcaccatccagccatatgtcagacaatatgacaaaggtgtcgttcaccacttgtttttccaagtctgcaagtctaatctgcggtcagacgcaaaaagactctgctgtgaatttcctaggtaaggagtcggacttgacatttacaactttctcaaccaagaagaacaaacgacgactcagggattaccatctcgtcttttgttggcgagccacatccgaaaaagtcgttttcagaatgtatcttttatccctgttttctaaaggagggaatccgcatgcaatcacctttaccaaaagtgtattttacaatgaacaacaatcgattgaaaactgtacaacctatgaatgtgccacccttggcagctctattttacctgaaagataccgttatgcatttcaccttgtgccaaaactatagtattctctgtgaaaaaccctgtggttatctgtcttgtagtaattgtcaaagaaaagtagtcatagcacaaataactcaaaatgcaattagttgctctgcctttataaatgtacgaaactataaatactttgtgtaaatgcagtttttggtaccaaagggatattgctttggacaaatcaatgatttaaatccttgcaaaacctctgtttcaggtagagatactagacagtaaggttaaaaacattatgctctgcatcccaattgctaaaaattgacaccatcaggataaaacctaaggcacactcaaatcaggaaagaaaaagagaattgtactgttgctttaccactctgtgatccgtgtagtttactactcactaattagtatctgtacaaaaaaatggattgtggcaaaactaaacaacagatgctctctcattataaggagctacaacattataaagggatgattgttactaactacagttttagtcgcttattctgcggtccagtctattagatcacaacgaggaacacatatttttgcatgttgttcttcagcttctgtatcattaacaacacctcgacaccctgggaagccacacgaacatgaaaggcgctccccgattgaaaagaacctgtaaacattacaagatcagaggcagaaaatgatcatagaatatctcagatgattcaaagggcatcaaagtgaaacctatagtcataggtcagctcttcccatttagggatatgcctctttgcgaatatgataatgtgctcatctccattaacagtgatgactcgagaatagcaattgggctgcattaaagttagacaaaaatgctcagtttttgcagatgctaactaaattgaattagattaacagatatattcataccacacatgaatgattaatcaggtgagcaatgcttcctgtccttgtagcatctatgactcgctcatcatcgattctaaacatgtaagtccctgcaccctatcacataagaaaattttgttttttctcagatattgaattcgtcgcatccaagatttatactacagagaaagtaaaagataaaagaaaaatacaaaaagttactgttttagatgatgaataggtacagattaatcccctgactatttgttccattattgtttatagaatcttctccataacatcaaaatgtagaaagtaagttaagtcagaaatacgtaccaccattgaattgtagatgagttgttctcttttgtcagctattgacggtctaacaagttctccggtatattcaatcatctgcacaagaatcatacaatatttccatgagtgacactttctaaagatgaaatgtccagttcaagttgagtatgctcaccatatctcccgccctgtgaggaagctttgcaaaaatgccaaaaccatgaattcctgatttccctgaaacaaaaaaagaaccaacttttataagatttttctgaaagaagcttaggatgtgactagatcattctgaaaggaatcctacaaattatttttatcctacagaaatcctactatattttttatcttagcagaagttgaaaagacctgtaatatcttttaagatttactgaaagttaaagaataacgaatgcttaccaaatgctaatctcttcctgtatgtttccctcatgtatctatatttctcagccatagaaagaatgttgcttggagtattcatctgtgacaccttggatccgtgaatgcttttgtacgttgaaaactcaagtctagagtaaccaccaataacatatggctgattctcaacaaataaccgctttgaagaagcagcagcaagagcttcaggttcctttcgccctcttctgccaaaacaattataaggctctgcaacaatagacggaaattatcatctatactgacccataggatgcaaacacgaataaaagtagaaaagaatggaaacacaaaagcctgaaatttgacctttgtatcaaatctaaaaaatgcttgtatataaagtaagaaactgatatcttaagaggatatgtaagaatatgaaagagaacaaaacacacatggccgtatgcaaggtaaaagaataatgatgaaataatcctgtcccaaaagtgtggtgtgaatctaaattttaatcttagcatccacagataaacgcagtagctgcatacctgtccgagcacagccagatggattaggtggtgggagatactcagaagttttatgagtagcggatttgatcctgtcttctgatcctaggcaggcagttgatgtttgtcgatgtcgcttgcagaatgaaagcatgcggatacactgatctgcttcttcaccctccactgacatgtcattctcaagctacatggagagtcaggaaagcaataatcagttagaaacatctcttttgtggacttgctgtgttagagtacatgtgtgtaagtgggaaagaaattttttttattccctaaggtacctcaacacagagaccagcagctcgcgcgcagagtggatgatatgccacgcgacaagaattgtttgaacactgaaatgtagtcattttaaaattatatatatcagctcttgaacaatgcataagaatgattcagttttctcttaacatagaacgaaatcttacttggatacaagctccataagataccccgcagatggtgcacattaatttccaacgatcctagttttaagagtagagaaaaagaggaagagggataagagttttgaaaaggccacagtaccaaggtaaaggaatccgaacaagaaaataagtacgtaccttgctgactttattcaccccatcaataggttccatcttcttgacatcagataaacatgtttctgaataaaataacaagtgttaatttgtaaataggaaagtaatagtgtaatacggcctcctattagtaggaaagcagacttatacagaacaacaaatcgttaagattgaacctgggatccatatagcacaagccagatgagcccagcgaccatcagttgtcggcttcatagcaccccctaaaagaagtttcaattattcactaatgaaagcacatatagactccatacaccaaatggtacggtaaaattacctactacaggacaaagacaacaccgtggaggcatatcaggagcaccaggacgacataagttgcataaccacaaagcaccatcacagggttctagctctccatagcatttagcatggacctagtagtggaccaggaattcaaattgagtcatacccaagagaaagaaagagcacaaggcactaaagatatacatctaagaggtatatgatagctaaaaaagcccagagcatgagctataccatcattctacatttatcacattgcaggaacaaattgttctcatactcctgcagacaaaaaatatataaatcagaactaactaaagagaaacgtttgaaatctcatgtgaaacaaaaaaaaaacctttacctcatccatgtggcagacattgcacttatcgagatctttccagtcaacacggacaggtcggtaaccagtaggctgattttgatgccttcccaaactatttttgcacatggaaacatgggacgatggtctggattttgataaatcctgctacgtaatggtatattagggtgagacacatattaagtgtagacactagaagctaaacaataatgcaattgtataaaacagggcgccggcaagcagtacatagggaattaattataaaagtttgcaaattctagcaaccatcttgataggtatctgcctaatgaaataatataaggtaatatgtcctacaaaacgagtttcgctataaagactccagaacagaattctactctttagtttcacttaaacacaaattttctttcaatcaatagaccaaatgcacatattttatccttagaaactcactgtaaatacttgttaagctggcttcgattaataactgttaatttaattcatacagttttcttacagaagagaaagaaaccgtaacaattaaagaaaagaagccatagtcactaggcagaaatgattatttcgtaggtgaagttagtgttgtctcattgatgaagatgtgattctaatatgcctttagaccggaaatagcgaattaggctacccataaaccaattagcaaagagctgcatagaaatatttagtgcacaagcttaaatgtcttacaggaaaacttggtttgtgcatcaaacattcatattaaacataaatgagacccgcttacacgttttagagataaagcaaaagcaagggtaccacaaaatattcagtgtccagacaattatatgatttttatgagaccaaaatgcatgtgcaagcagattatcatgaaaacacatgcacaccaccacaaataattttacatgcaatgacaaggtacctgtacaagtttaatgacttctgggttggagagaccaaacatgtctgtaccagatccatttagttcttcacccaaaatattaggactgtcagaattctggaccttttttatcctattatatattttgttccagcaggccgatggagtaggccctttgaactgccaaaaaattagttaccgatgttagccagagatagattcttgacctgaaagttcaataaaacagatactaatagatatgtttaactcacctgctctccactatctgcagtcactataaacagcggatgagtctttgtctcggcatctctgagcacttccatcttgtacaaggcagatgcactatgatctgcttaaaaccaaaagcaacaacccacatcacattgagaactaatcacaattaaccaaatatggaaaaatacctgatttataagtaaaagccaaaaactgattaacaaataacctgtgagtgatgtgaactttctcatcgccgtatacccttcaggccaaatatgattctcatccttgaaaaactgagagtctgtcacaacctttcctgtaagacaagtcatacgcctatatattatcattggagttttcctataaccaactataaataatgaaccatagaatgaaagattatacaccatacttatatataagtttcatggcttaccaagatttattattagcagatcccctattatatgccggaagtctacatgttctgttggtctcaaccacacttctccatcattaagaagatcaccacccgagtttccctcttctgtactattagccatatcggaatcaacagaatcagctcccttttgaagttgactcattctttctggaagcctgtgtgccttcagatacctgagtgaggcaaaataacagaaatttcaggacaggtaacatgtccaggtttcaaaatgaaacatcatgaagaaatgattggtctaattgttaatgcaacatgtactggaaagtcaagaaagcagaatgccaaagaaaagcgagagggacttgcatttttgcttcctgcatgccctcttcaaaccgaggttgtttgcacttcaggtgagatggcgaaagaagccctttgataaatgagattgcttgctttacttttattctataaaaccaaaggatgttaacttcagcttgataatgtgtaacattgatctcaacatctcagtagaaaaacgagattttttaagtatataggaaacgctgactaacctagcaaaatcatgagttccaaaaaattggaccaagagtgatcctcctccagataccttgttgtttagacctttccgctctccgataatggattcgtctacaataactgctggccacatagcatgacctgtccgaataggaaagcaaatgcagttctatggaagtcagtaggtagttttctttgtctacatgcttccaacagcatcaacttgctgatagcataaggaggtattttttttaatatatgaataaaaggtggaaatcagtttaagacaaaccagctagtttcgcccatacaatgtctccaggctcaaaatcttggcattcgtccaaagtagctgccaatacaaccatctcatcgtaatcacggccatcgacagtcacattactagtacaaaacttcagatgtaatagctccatctcttcacgagaaaccaaaaatttgatcatttcacgatcaaaaactatatcctcatcacatccatccctatatttgacctaaggaagaatttaatcatggttagaggaacaagcttttacatatatcatagctcaaagaactacccaactcataactcaagtagagtagagaattacttacagtgtaacgctttctctctgcactatatccaacaatggaaccttcataccaaagagcgtccagcggccaaaaaacctagggattaaacgacaaccaattgttaagatgtcccattcacaaaaaaagtggaaaatgcaatagcttaaagtggacaattgtctagttaaaacactcgccttgcattgcagccctatgaaacttgtaggatccacaccatcataactcaacctgccacatcaaaactccatcataaggagtctgcccactaacaataaaaggtcttcaaagtctgaactaagaaaatcatcagtgcaaaacaacagcgcaacagtttcaaagtccatgaatttcaacagttaaagagatgataggtagaccctaacctgacccatttcttagctgaacgagaagccagagtcgccttgtcctgattcttgctagaagaccccttccttcgggatgacccattttgcttattcccactaaacgcattgttttccttacaccttcttaaaccaatcgactccatacccgatttcaccaactcacaattaccaatcttccttctcttcttctcctcaaaacaatcaatttcatcaagctccacactttcagtcttcacagccaccgcctgatctagtaaacactcccgtagcggcctcttacggcgacgatagtagacgcgaacaatctcaggacgctgaatccgcaacttataatcatccgaacgacaacaatcgtcactagcactaacaccgctaccttcaatctcgaattgctcaatcatcggaagcttctgggccttaaccttcttagacatcagactgtgagaaccaacggcattaacacagcacaatgccgatgaaggaatagagtagatactctcaatagaatcgtagcgaatcggagcttccactagatcgtggacatcaatttcgatctgggtttcgttagaaaaacacgccatggagattattcggagggagaaagcacagggcttcgtaaaggagacacctttgctcactctctctatccttctttcactaaacccccaaaaaaattgctagggaatttcgtggattggagaaattagggtttaggaagaagaatcagagaaaaagggaaaaaaacagatcctttggagggagaagctaaaaggcttttttacgtttcccgccgggtttattaagatgatgacaagtctttcagatctattgctctgtctccttatatatctccgcatacatacattcatatatagtgtgtgtgtgtatgtatataaaaattaatatctggttaataaaaacatataaaactaaaaataaaataaataaaaattccacttgtagaaaaaaaaaatcccggttgtcatgtattttattttcaacaagagtcttttttttttgggcaaaattcaacaagagtctctgattcttttatatagttttgttttcagataattgttgtttaccagtttttgtgtaatcttcactacatggaatttgttttgttttttttcagttcatacgtatatttttgggtttttagtctgttaagtatagtgtataagacatatttttctggttaatccaaattaaattccattggaacaaaaagacaagattgactagaatttgaatgaaggtagaaatcaaccgaattgctcataaattcaattattgaatggggttcttcaagtaatactacctattttctcaaatgagctagagaattttcttgtgaggaaattccaacgatttgctcccttggtattacttgttttggattgttctgaagttttctagaataatataatatttcaacctaaaaagcttagtttgtggataaataatcaaacatatgttaaagatttttgtgatagatacaagattttttctatgaatcggacaagtggaactctaatccagtttttaaggtgtgataagttgaagtaaagatatgaggttaaaagaaacatttcaactcacttcccttatcttcattcttaaatgaacggctattcatagcaattacttgatttggattcataaaccgaatatctgtctagtaggagtagtctttacttaacttaactaaagaacaatatacggttgactgtagtatattagtatgcttttgacacatggaaaataccgctgctaacttgatcgcatccagtgacttttgcagtgtgtcatatatgttaataaggatgtaatcatcatggttaacagtagttgcattttcttatgcggtagcatacaatgctcactagtgctctaaattgatccacatagggatgctatacacgctagagacatatatatttaaaagtaagtaaggttaaaatacttgctttcatgagcttcaagataggtgatgtgtgtacctccaaagttcttcccatcaactaggcattagaatatgtcgtttcctagatacttggggcagattggcggcttatcagcttttcggatgaaattttgatacttggacaaactggcagctgatggatggaacttattgtcaaagtatccatatagcgtttgttggttggctttctctagatacccacaaaatttacacaacacatatggcctatggtcacaaaattctttgatgtcatctaacattgggattcatcatcgcttacatgatttacgtccatatatacttggacataaatattatggaatgaacaattttaaattttcatcaaaataccaaccacactcacttaggattatgaccagaacaaataaaataatacatacttgattaaaaggagaaaaacatttttttatgtctttgttagtttttattttaaactatatattcatcaaaaaaaaagagggaaaatcacattttcagacacatacatgtccaaaaatatttgttttcccctcaaattcacctgaacttaattagtaagagaatcagtgacgtcatttagtaagagaagacccggttcggaataaaccggctaaagaagacccgggtcaatcagaatcaaaattgggtggttttggttagttaaacaaccctagggatttaaatactgtaaatcgtccagctctatttgtccctctcctccactctcgccaactatcaatcaaatcttcttctccttcttctccgccattcttgtccctcttaaaccctatcatgctcttctgagattctcccctcctctaattcagctctctctcttggttgggaatttcaaatcgaatatcaaccactgcctctgatcgtcatcaaggtttactctgtttagtgtccggattctcaaactccacggagaatggatctgcatagcctcgctttgatcctccgaaccgccgctcttagccctattcccgatgagcgtaaagtttctgagcagcaactcaatcaggtttctcagtttccacttcaatttctctttcgatgtatttacacggttgcttggtcgcgagtttgattgttcttattctgctagtagtatcttaaagtttgagctgagttcatgtatagagtttccttataagttcactttctggttttactgaagatagttcaaagattcccactctttttgaacaaatcgttatttgctttaattcactgtagccagatttcagtggtgtttactatttctaatgatcaattaaagttatgcagtttctgatgcctgagtttctcgttattcttttgtcttgcagttggagcacacgccccagcatttggtgaggttattgcagatagccgtggatggaaattgtgacatggcagtgcgtcaaattgctagtattcagttcaaaaatttaattgctaagaactggtcacctgaggattgtggtaataattttgtattctaattatcttgtctcggcttagcgtttggaagatctttagattaatttgcatatttgatggtgcaggtcctgcagtaaggcagcagcagatatttgagagtgacaaagaattggtgagggacaatattctcgtctatgtcacccaagttccaaccttactcaggtaaatttgccagatagcttttggaattatcattcaagtcatttggtttgctgaactctgtctgacgtggtctgattttaagcgattttatgaaaatatttgtaacctgtatggctaatcatgcctacaaattgctcatcatcttgtctgatagattgtcttcaagctgatagtcctcttcttttatatatacatctttgaatgtgtctctacattatccttaggttctagatattaaaaaacggcagatagaagatgatttttttttaagttagtatttttttctcattaccttggtcccaatagcatcttctataagcctcaacaacaaccataatttttttttcccctaattttcttatccagatcacaacttggagagtctctcaagacaattatttatgctgactacccagaacaatggccacgtcttctggattgggtgaagtacaacttgcaaaatcaacaaatttatggggctttgtttgtgttgcggatactctctagaaaatatgagtaagttcaccactttctgttccgtatccctatgtctgtgtgtatgatttaaaggtttgttagtgaaatttttgatatgcgttattgagacatcttcaagattatctttggtggcaatagcgcaatttcgagtcttgcatgtatcacactgagtagtgactaataaaattaggtggtaaccgataatattaagagaagggaaagaagtgttaggcaggagaaatgagagtgtttaaaacgtattgttagaacacaatggttttcgtgtctctgtcaattcatgatgtcctgtcaagtatgtgacgacttccagctagaaatgcaagttgctctttatatgatgacacctaagtagtatatcccgttgatgatgtttcatgattttattttctaggttcaagtcagatgaggagaggacaccggtttcccgcattgtggaggagacatttcctcaacttttgactatttttaatgggcttatccagataccaaatccgtctctggagatagcagaacttatgaagttgatatgcaaaatattttggtcatccatatatgtaagttgctagagagatcagttacatatgcctctgcggaatttcacattttatctttcttaacataatatgcatatccttaaaacacaattcaaaccagttaagctgtttaatgtcttttttactgttctctgtgggcagctggagcttccaaggcaattatttgatctaaacgtctttaatgcctggatggttctgttcttgagtgtttcggaacgtcctgttccagttgaaggtcagcctatggatccggaacttagaaaatcttggggctggtggaaggtcaagaagtggacagtgcacattttaaacaggctctatagtcggtatgtctttgacattaatatttttttaacaagaaagtacgcttgaaaggtttatagaatattctttaacaggtttggagatccaaaacttcaaagtccagaaaacaaacctttcgcccaaatgtttcaaaagaattatgcaggcagaattttggaaggccacctaaatttcttgaacacaattcgtgttggaggctatcttcctgacagagttatcaatcttctccttcagtacttaagcaacaggtttgtgttacaatcacttgtagacattagtttcatgtacatacatgtacacattcagtatccccacttggctaacttaagtatcatcttttctctgacattataaaatttttttttggtcactgaattttaagttcttggaattaattagaaaactcttagaggtttagatgttttgtaaaaaaaaattcgttgaaactaattcgttgtttctgcagcatttcgaagaatagcatgtacaagttgcttctgcctcggctggatgttctgctttttgagattgttttccctctaatgtgctttaatgataatgatcaaaagctttgggaggaagaccctcatgaatatgtgaggaaaggttacagtaagtactacataataatgactttcttaaaaagtcttaattcttaaaatcatcatttgtaatgttatttgttgtgctgtagatatcattgaagacttgtacagtccgcgaacagcgtccatggattttgtaaatgagttggttcgaaaacgtgggaaagaaaaccttccgaagtttgttaagtttgtcgttgagatcttcttgaggtattacatttgagctcttctgcttggaacttttcatatcagttgtgttttattgacaacttgtttgtccactgtttgtagttatgaaaaagctactgtagaggagaagccttatcgccaaaaagatggtgcgatgctggctgttggagctctttgtgacaaattgaagcaaacggatccctataaatctcaactagagctaatgttggtgcaacatatttttcctgatttcaatagtccagttggacatcttagagcaaaggtatttttggctttaatctgtgttgtggatatctcagtaatccattgttactagcttaccggaatgaggattttgttttgcatttccacgaagtctgttgtacttcaatttattctagaacgcttagcattgttgcttagttggctactgcattgctgtcgatagtttagtatagacttcccgttgttacccagtatttgatgtcatattctttgtgatctcctttgatctgtttgacggttgcatttttttggatgtaggctgcatgggtagctgggcaatatgcacacatcaatttctcagatcagaacaactttcgtaaagcattgcacagtgttgtttcgggactgcgcgatcctgatctccctgttcgtgttgattcagtttttgcattgcgttcatttgttgaggcgtgcaagggtatgtgatttccgcctacgcatttttatatgcgtgaatgtgtttgcacttgtttacctgtgtgttggctttttgattgtgtgctgggttaatgttgtggctaattaaaactttctggtcaaatgcagatttaaatgagatacgtccaatcctccctcagttacttgatggtgggttactcttctttatgaatactagatggtcagtattgttgaagtaaactaacgcttcaaacttattgtgatcctgcgtccatcagaatttttcaaactcatgaatgaggtagagaatgaggaccttgtttttactttggagaccatcgtagataagtttggcgaagagatggctccttttgcttttggattatgtcaaaatctggtaagaaaaattggttctctgagttgatatttcttgaatactcaaacttggtaataaatatgtatttctgcctttgcttttgttcaggcggctgcgttttggagatgtctaaacacgtcagaagccaatgacgactctgatgacatgggagctttagctgccgttggttgtttgcgtgccataagtacaatccttgaatctgttagcagtctcccgcagctgtttgttgagatagaaccaactatacttccaataatgcagaaaatgttgaccactgatggccaaggtatactcatatagttttgggatatagtttgtagactccgagtataattaagttatagttgtgtccagaggatgtacatttggactgatttggtagccaactagccatttgggtccattacattagtatggttttttttttcagaattgtataatccatttttttgttctgtcagccttgtgttgtgttgtagcatcacgatcttaagtttattaatttccttttctagctatttctatttaataattgacactgaagcatctatattctcatcctatttgctattggcagaggtatttgaagaagttttggagattgcatcatacatgaccttttattcacctagcatttccttggatatatggagtctctggcctttaatggtggaagcattggttgattggggaatcgatttctttccaagtatggtttctctcacatacctctaaatttttctagactttggattttatagttgactccatcacggtagcacttccacgtcattcatttttttgcatacgttcactcacgttactctttgaaattttagatattttggttccaatggacaactttatatcaaggggaacggctcattttctcacttgcaaagagcccgactatcagcaaagtctatataacgttctttcaactgtgagtatatcttctgatagtgctagtgagttagatgtctgtgcttgttgattgttgtaaggaactgtaaggttataaaattcttgcaaatatcatgtagcatagaatcttcctttatcgtttaacaaaatttcgagttcattttacatgcctattgtggtaaaaagttgttggaatcttgtttattgtgaaaacactaggaatactatatgttacattcagtactacatgccatttttttgctaatatatatataagcatctcttatgtttttccgcacaaggatagcttatatatgtctcacgtttccacttctacagcttatgaccgacagaaacatagaagacagtgaaattgagtctgctccaaagcttattgaagttgttttccagaattgcaaagggcaggtggatcagtgggttgaaccatatctgcgtctcactgttgaccggttacaacgggctgagacttcgtatgttaaatctcttcttatacaagtggtaagaactatgtggaggatttgttgacctgctactggttgatttctacttaccggtttatgctcttacattagaggagatatgtatgtcaatgtcactgtatgaatcaagtgggtcctattgaactgattctgttgtgtgatgaccacaatgatgggttgaaatttccaagtttttttaatagcaacagcaccagcgttatataccatgaagttctcaacataatatcttgatttctgttcgcaggtggcaaatatgctttactacaatccaggtttgacgcttggtgtattgcataacacaggacttgcttccaaagtctttgacctttggttccagatgttgcagcaaaagagaaaaagtggcctgccagcaaacttcaaaaggtactgttgatgatttttgttatgtcacatcttgttcatgttaacttataagcgtaatggttggaaattctattgttcgctttgatagctgataaaggggttgttactctcttggtaccagggaacatgataaaaaggtttgctgcttgggtttgacttcattacttgctctccctgggggtcaattccccgatgaagcgctgcagcgtgttttcagggcaacacttgatcttctagttgcatataagaatcagctagctggtatgtcctgctcatgagtcatgatccattttctcttcacttggcatggtaatctttacatttattccctttccaatcttcctcgcagaagcagctaaggagacagaagtagattatgaagaagaaatgaatggactccagagtagtgatgatgattatgatgatgatgggtctgatggggagatggatgatacagaggaaggagatgaagcacaaagtgttaaactgcagaagttagctgcacaggtttgtgaagtgtttgtatcgacttgcttctgcgaagcatggtttttttttgctggctttgactgttttccaattcgtttatccttttcataggcaaaggccttccactatgatgatgatgatgacgacgattctgatgatgactttagtgatgaggacgagtttcagtcacccatcgatgaggtggatgcctttgtattctttgtcgatgcaatcagaggtaccattaaataaaaatcctatggttaccagttttgaccacataaaatactatatggagcttcatgttctctggcgtatcttgcttagtaatcacgtccttgtttattatacagttatgcaggcatcagatgcgcagaggtttcagaacctgaaccagtcactggacttcacttaccaggcgattgcaaacggaatagcacagcatgcagagctgagaagagtggagatcgagaaggagaagcaaaagaagttagcagctgcttctactcctgttactgctctatgatttttaagctttggatcaaagtcagagtctgatacacagatggtgtcatttttgtgagagattctcgttcataaatatttggcatagtcgcttgcttcgaggttatacaaatgaagaagcagattttgtgaattttagcagaagagatcatccctagaaccttgtgaaaccgtgtggttacggttgatgaagatggagtctcttatggtatgaagaaagtgtgtactatacaatgtgttgcgtctcttcttttggattggttgtattcgtaaagaaagacagtttttggggagggtgggggattttgtgtactctttatcctatattatgtgtttggtcttttgggatgtgatagatttttttaggaaaagctatattgaattttttgtgatctcacagagagatcagcaaggtcactcatcaggttgtacgaccattctttcataaagtgataattattattatcaatctgtcactacatgttactttctttctttagtttactctggtaggtcaattctagggctggacgataatatattttgtttctgaaggactaaagacagagatgatataacttgaggacgagaacattaattccagcttagaagaacaaatatcttcgttatatttataaaattttacattaatcttgccgataaacaaaaacatcattttactggtctcactcagttcctataatccatcgtacaagttattctcatccgattgtgttttccctcggcaaaacctatttatacccacccatttgtgacaatcaaagccatgacaaaagtatttggtgtttctgtagaatttcttccttacccaaacataaactcattatcctattatttgtgttacagggaactatcatgtttcatagcagctaggaaatttcattccaagatggagagagtagcaggcattcaagagacaaaaccagtaagatgtgaagaacacactctaacagtcaacaacaatcaagcatgtaatcgacatttgagactaaaacgattgcatcgacatttaagacagtagagaataaaaaagaatagatcctactactacacctatatcacgaagaagccaagattccataatgtgggctttgttagcatcagtgtgcaattttaagagtagctgatgcagcttcactacaataccataagtcatactgattgctcaaagtttcttagtgcttaaaaattcttattccaacagagttcctcaccgagagataagaagataatgaaacagaagcatatatcatcacactcaagtttctttattctcaaataacaaacaggtcccaaagctttcaagggattgaaattgaaactttctacagactagaagactgtgaagaagacggcacaacgaactcaacaacaatggtagaatccacataatcacgaaccttatccttttgcgaattcaccaactctttctgagcatccacagcttccatttcactcaaatccttgaaatacgcaatcgaagcaatagagaaacctttagctctagcaggagaaaagttttctccaacagtaatctgatcaatccctggaaatttctcacttagtcccttaatcactcccgtaatctccgatttcgcctcatctgctacatcctctttcaatttgagcaatgtgagtttagcaaccgaaccaggaagcggcgctacggttccggggattcgatcagcgatccaatcaacagccatgatatcatcacagatcggtaacacagattccttaacaacacgaacgtgatctggatgtgcagcgtaggaggctagatcttctttagattcgtaacggctatggagtacgtgagtgaaggcggtagcggaggagatacggtggagaggagaggtggagatgtgaagcacttgatcgagatatgcaagagcgttgaggttgttgatcatggaggtgattttggtggagtcagcgtcgtctttggttttgaataagacgatgtgttctatgatctgactctgtggggttgaagaagacatgacggagaaggagcggcgagggagtaatcggagattgattctggagtgtttggttgttgagatagtgaaagctagtggtgacgaaattagcggtcggattcttgcgcatatcatcttttaagattgtgagtggtggttgagagtgaagtgaccattggagccacttaataaacgtttttctccttaagtttcatcgatagtggttacctagtgatgtcattgaaattatcgagattatgcaataaataattatcgtataaattgtttactatacgatccacacataaacactacaatttttgaatctatatgatctgcccttttttctatggttgaaaaaaattcaaaagaaaaaaaatccacaaatgaagcaaaagaaaaataatttgggatcaaaattcaggtcacgaggaagaacagcaagagaaaccaaagccttgtgtggagcttttattatcgtccttaacgagactgactctgtttttcatgcttagttcggttttataagtgtcggagttgagttgtttccggcttatattggtatagatgtcacggattaccatttcgaaagctgttttaacatttgttgaatcgagagctgatgtttccatgaaaaatagtccttcggtttcagctagtgctttgccttcttccacgctcaccgctcttatgctttctagatcgcatttgtttcccaccagcatcctcgcaaccgttgtatccgaatgtgctgccaaaataaaacaaaaaccacaaatgaatcaacaaaccagtattcaaatcaaacttgaacatatagacttcacatttggcctaagtaaagaataagtcaccagaaaatcttgaagatctaaaccgttagcggactagacaaccctctatttttggagcggataacaaaccgtggtggacaaagtttacttctacctaaaagcggtacgtagttagtccgctgcagacttgttctatttttttcgatccgcactactacggattatagtttatgaatggtaaataaaaagcagtccaaaccgcatatacatttgtccgccatgatcgccacaaccattcaaactcctaatcaatcaacacaatctaccaaatctggagaataaagtccacaattccaccaaatccagcttcctaatttgcagtttcaagacctaattgactaaatccactattcaaattgaggaaatactaatcttagctcaatcaaatcgcaatcaaaatcaatacagacttactcttgagctcatcaagccaacgaccaacactctcaaacgtggatcgacgactaatatcgtaaacgacgagagctccgacggcgccgcgataataagcggaagtgacggcacgaaaccgttcttgaccagcagtatcccaaatctgagctttaacttctttaccttcgatttccatattctgcgtctggaactcgacgccgatcgtggccttggaatgagcgttgaactcgttacgagcatagcgagagagaaggttcgatttcccgacggcagagtcgccgattatcactatcttgaatagatactcttctcctccttcgtcatcggacgacatcgttttttttgtttctgattttgagagagagaaagttgcagactggttttagagagagagagagagagatggagctggcaaaggaaatgatagagaagaagacataatgcgcatgaagtggttttaattatttgttttgaattatgtgccatgtaattcggtgcaattataagttcttgtcgtgtcaaaaactaatgggccaaaatattgtatattaagcccaaaacagcccataattcatcagcgtttaagtagctgaggcctctagagtgcggttggtctaaaatgagtatttaacacattttgattattatctttgttaatttaatgtgtaaatgattacgatgtatatttctgaatggcttaacaatgataatatattagacataattttcagtcttcgaaataagttactttgaatcatataaacacaaaatataacaacaatcaatagtctatatactgtatgttcccacatatgaaattgaagggccgtattctctaacgttagtcaaagtatgacctaattaccatggccggaggaattagggaagaataagaggagaccatagcttagtcatcttaaatatactaataaataatttcggtgataaaattccaactacagagaaattaatgtttagatagtcaattccaatttgcatgaaacatagaattatagtagaatgatgataaagtgaagttaatgtaagaaactaaacatccaactagggagaatgtttagttagtcaattataatttgcatgaaacatacaataagtataagtacaataaatgacagaaattcaacactcattgttcacacattcaaccaaaagcaatttagagtttttttttgcctggtttactacactagtttaagtttactagcttacatatatgatatatatatacctttataactaaaatattaatattttagatattggaaaaatgtaaacgcagatatgaaagtatgaaacacagatgcattacgcgtttgcgacttttgaaagatgattgatttatacatctaaccttcactttagtaatatatacgctgacgttgtacgaattatagatacacttatcactatttgttccatcttaaatacttaaaacctaaactttagtcctaaaatatattacaatacgacatatggttagaaaaagaaaaaagtagatccacggcattggaccaatacatcattcgttgtctcttcaagaacatcatcttctcgccatttgtctttaaaaactctaatgcaacattgtcactgtcctcatcttcatcggaatcgactgatctcgagttagttctccgttggtttagaagatcgatataggtttggagatcgtgaacgcaagaaatgttttgaacatcgaaaaaatctagcgtgagttccaccccaacatgaacataacatgaacagctccatggaagctcataaaaaccacctaaaaccctaaaattctcattgaataaaacacctggaagttttgtgaccggatcattgacgttagtgatcctcaagaccttaacacctagctcttcgcaacgttttttaaactccaagttaccaaccctaggtcctgcgaaagagaacacggtcaccggaatatctcccttgccaatcctccggtttaaacctagttccgcaatgtcataagcaagaagttgagccaatgagcttcccatgctatgtccagcgagtgtgatactcatctcttctcctttatacttattcatcaatctcgagatttcggacagaagctgttgtctgcagctctctagtccgaatttgctctcactctcatctgatgtgtataaactcaagaacccggattcaaccttcacgtcgagacgcgggttatgaggatggaacctagcaggagttaaagagctcatgaaatttgccaaccattcagggttagttaccgttccacgaaacgtcaccacaatgtctctcctccctaaacgtttcaccgagtcatcggatgaagctgcaacgtaacctacccaacgcgctcgtcgattcatctcgttctggataggactgatgttgatgttaatatccggtgtggcgtagatatattttgtgacttggtagtcctcaggttggtcgatttcggtttctttaagtagggtttgtttgccgtacttgcagttcaagtaacgtttggaattagggtctagatcgaaggctttgtaacaagtggaaactaagttgccgtagcgagtgatctcttgttggagaagagggttcaaaggttcgatgagatctttccagttgttacatccttgtatctctctccatacccgagataagggtacagtcgctgccccactggagcaaggaaactttggtgcacaatatatcggaggaggagaagaagaagcaaccggagaatttagaatcactggtgctaatagagaagaagaagaagaagaattagcagttttaagtcttttggggttttggtaagaaatagggagagaaagagtatacggaataaagagtgtttgttgtggagatctgtttcttagaaatggagcatgtttcatattagggttttggatcaaggccattgatggaagatgacgtaaccaagagagaaagagaggggtttgtggagcttttcagagaaataatttttgtgatgtatttatagtgaacatggataagacttccccatatttttgcgtgtattgactgagaaatgagatttaagttaaaatactcgaattgcgatcgttttgtgagagtgataagaataatttatgtggtcggttttctattattaaattcttataacatatgattaatcttttcaatttctgtttctccttacttcagtcttttgtacgcgttaccatatcatgtgtggactacaaaatataattattaaattatcgactatatagtatataccaacttaaattcctcgtattcttgaccataaataatgtagtaaagtgatgaagggttgaaaaaaagaagatgaagagaccaaagtggtgaagtaatagtctgtcatattaacacctacgcttcctacacgcatacatgcatattcttaatttgtcattttgcatgctgctgaggaacaaaaactacactgaataaatgattaatatttttgtaattaattgacaataaatgtttagcttcttatatatacgagacataagcagttttttcagtaatttctcgttttcactaacttcatcgttttcctgtgatgcttgctcatctagtagtagatgagctctcaatatttgtgaatatatattgacgtatatattatagagtatcaatgtaattctataactcgatatttataaccagtgagctttcatcttcgttgccacataggttagaaaagcattttaaattgaagtcaaactgccggagagaaaataagtaatttatctaaacaagaactaaagaaaaaagaaagtatatatatatatctattaatcttagaaaaattctgcatcttgacacgctaattaagtaaagatttgttggattttggaggtctgattttcttttctattggcagtaaattctttgtcgaataacatatatagactagtatagtaaacgtcgataatttcagcttttaatattacagattattatcgtatatggataacagagaccatatatataatacgcttcttccatattctaacagaccagaccagaccagaccatatatatgtttcaaattagtcctttacaaatacatatacaatgccaatggtgtatatataatataatttttattttttggaaaagtatatgcaagggtagacgtaacatggtggtggattgaaattttaaagtttgatgggatcgttttatttttccaaatattacactctcaatgcgtccatttatagtttttgtagtatatttactataaaattttgattaggataaaccaagttgatccaatataaatcaaaatttatataaaaaggattgtatttgattaaagaataattctgaattgaaatttttgtcaattttttttaatctaaacatatccctaatcatgcctttttggcaataatatcttttttgcagagaagaaaataatacattcgaaggagaatgaatacgcggagacgaaagattttgatttttgacttttgagtacgtttgacacatgagagcaaaaagtggactcaaatagtacggaagaaatagcagttgtgtttgttgttgttcgttatttgacccttcgtggcgtaaaactcccatgcaccttcttgtttctttcctctctttttttttcttttcttttctgtttcgttttttgttatatttatgtatgtctcgagaaaacaatttgtctttttttttgtatgatcttcatgagaggatttacatgctacaccaaaaaaaaaatgtagcttgacgaaatttagggatagtcttatgccaaaattttattttgtatataattatatttttaattcaaacaatttttttcaacggaatggacttaaactaaaataatggagttaaatacaaatttttcaaagtaataattttacatcaaatataaattttgtatagatttttttttctgttaaggacaaaaaagagttttagcaaaacaaaaaaaaaccgtaaacagtattagaatcgtttctttttttaataaagagtattagaatagctataacttagaaaatatatataaaaaatagttagagatatggtatcatatttggataattagctacaaattttgtatagtaaagaaaaaactattgcaaatccaagaccaaaaactaaagtttctaactcgtcgttgttgtctttggtatcgcaaataatggtaggaatttttagttatcaagtattcgtcaattgtaatgtgacatgtagtctgatgtagatcatgaatatacaagaaaaacattaagtaaaggtaaagcaacgttgcttacgccgaaacaatttgtgatgggaaacatatatccaaacccaaattgaaccaatgtccggaatgtaaacaccaatatatttttttacagtaaaataatattttttctaatctatttgatataatttaataaaaattaatctttattcttttgcatggcgctgacatctttataggtttggataactaggaaatttcgtggaagtctacaaaaatttgaaaacaaagattcacaaactgaacagtattttccgatcctaaagagaagagcctttattagtgtttggtcaaatccactacttgattcattgcatgtaccatgcgtaattttaaatctactcttcaagctcacattgtcaattttgagaaaaaagctgaaaaccttaaaaacattatatgaaaaggataaattttccaatagaatattaagcaagatgctattcacatgtttcaaacgaaatttgatcctttttgtccacatttctctttggaccagaaccgggttacttttctattcatcaccgaatgtgtaatatttgtttacttgagctaacttaaactcgaattagcaaacaaacatcacgagtatgtgtcagagaagtgtggacaaaacgtatcatgcctctcttgctgatgttgctattgaagcccaaacatatgcttactacgtatctgcctctctcttgaggctctttacaaaatctggagacaactttctaaaggcttggagccacaaagtttaagatatgagaatttttacagaatgtcatttccattcagtctccctcaacaactcgtaaaggccttgaaatctcgtgtcattagttattttgaacatgaaagagtcttcaaatcaacattcttcaaaatcctatatgctggtggagataatgaaaaggcattaaaccttgaaaattcttgtgtgaaatggatcttgaaaaacaccgggatatgatgcatatcttaaactaggcgtgggcattcgggtatccgttcggattcggttcttttcccgggtatcgggtctattcgggtaggaggttgagaaccattcgggtattcttaaaatttggttcggtatcggttcgggttcgggtcggttcggttattttagtaaaaatgtaaaaataaccaaaaatacccaaaatattttcgggttcgggtattttattcatatatacccaaatctacccaaaatacccgattacccgtaaatatattggttacttttatccaaatataagcaaatgtaaccaaaatacttaaattacctaaaaaaaactataacattggttatttttatcccaaatatatccaaatgcatataaattactaaaaaatctagtatattcggatttataattttaattttgggtgtttgaggtattacaaatatatatatatatataactaatatttttaactttacatttgtattcgggtacccacggatattagattcggttcgggttcggttcgggttttttcgggtagtgaagtggagaacccattcggataattctaaaagtcgggttcgggttcggtttggttatttttcgggtttttcagttcgggtattcggttccgggtattatgcccaggcctatcttaaacatatttgtacttctttgtggcgtacgttctagactgtaaatcagctttgttgttgaaagctatcaactcctaagagtatgagaggcagataagtgctttgatcgtaatgatcaagctgctaaccaaaactgatgaagagcacaagccaaagaagtgtcatttttgccactgattgtataattcaatattcgttttctttatctaacttaaacactctaagaaacgaacaaatgtcaagagaatgcggaagagaagtgtgagaaaaacagatcaaattgcttaaaattaaacaattatggacacagctgtttatggtttttgtgaaattttgtcctacaacattagctatcttctctgtccaacatgaacatgtcaaagtttttctgctcaactaacccaaaactcacaacacagaatgatctagcaaccaaacaatacattgcaagaacctgagctctgctccttctgatgcaatctcgacactgttccttgtttaacaaaaatgggatgtggcaagctctcactcttgtttcttcagcgcagggtcagtatttgtgactcctgatgtcaatttcttaacactgtctttagcctctgcaacaaacgaagcgtctggcttgtgtttatccgcaggttctttcagggccagacagatgtaaaacacaataactacattgactgataccacggcaagaaatccactcagtagtgtcagagaatgtggagacaacgttgttgaccctgtcgagatttaacagagcaacacggtcaatttctacagcatttactgttagaaactaaagctgggaaactacaacagacaagctacgtgagcctgagagagaaagagagacattatgccaaaagtacagtaaccgactaacaggctatcacatgtgtagatgatcaaacttcattacatgaactacgcgtcaaagactaaactgcctttgttacaagaagtaaggttacaaccatagaataacctcttgtagcattccagctccaactagtttctatgatacctacaaactaagttctaatcaaagaagtttgcagtttctaaaaagttacaatcagaatttctctaatctgccatcagatcccaacaaccagctattctactaaaccaagttccactaaaacttcaactacagagtttacacgattaagcaaaactcaaagttagaaccatcaatacaattagagcaatgacacagatgtcctcatacataagtcaaacctggaaattttagccttaccaggaagcaaatcattgttgaatccatataatattgcaataggaagaatccacataaacattgatgcaataaggaacttctgcataaccccagccatggttctgcatccaaattgttaaaccacgaatcaacgaagatgcaagatgtggaaaacagaatacacgaatctatatatagggttttcaacagaataacctaaataacacaaattaggcgacaaaagtaaaactttacattgaatctggcgagttaactcggtcttggactcaatgtctctcgcaatttgcgaagtcgagattttttcttttctctacagagtttcccttgtcaatcaaaatcacaaggaagccattattaaaccagaaagatatactaaaaccacatttcaatccggcataagccggtatatttattcggttcaagttcgaagaaactacgtgccgttttctaaccagagcataccgactacacgttgttttccactacctggcagagtaaatgaacgtgttctcttgtttgactttgggaaacaaataaaatgagtttctttctcttcaagctaatgtcgatttgtttgcagacttttttttatcctgcgttttaaatatttttcaagaaaatagggaaggcaataataagcaatggagaagaagagggcaagatcttatgtcaccttttcagtatttgcctcttgtgactaagtcttcatctttagtttggccaccttatgttgaagaagagcttcaaacaatgtctaaggggccgagtgagtcaatggttaactcaggggaggctcgttaggttgcatatcatgaatatgcggaaatccctctagctccttgaatgcatctgatcttgcacattatgtggtacaagggtatgttcttttctttgacaaggtaacaattattttttcctttggtctactttcttcgttgtttgtgttatctgattcattttttcttaaagtggatatttggcatgaagcataaagtactcccaaacaattgttttgtttgatgcggaaagtttctagagaagagtctgctaacttttttggtgaggtgattcctggactggattgtgtgaatttcttctccaattaccatccatgttaggaatgcactatcatacggcagaccatgtcttgatggagttatgtccggggaaaccaacactcaaactagtttctatgttttacgctaggattatttagtatgaaaaacttgcatgccacgacaatagagcaagagtctacaataaacagagattagtcacatagcacaactgttttggttggaatctctagttacaaccggagatggatgtccagctctgtgacggagaccagtgagcctcctcctatttgcctcttgcacaacttcgccatgaacatattgagctacggaaaaagctagttgagtattcttcagagagctcagcagaggaacatggcttggcttcttatcgtggctcataggtacgtcactgcagtctacctagaggaccaattgggtcaaagttatatattatttctgaattgattatgtgagatatattcatgtcactgtctgtttactacattctttcgttatatatataattggtgtgttccgacttccgatcttacgagtttatatgactttcgttatgtcattgactggtttgttccgatcttacaagtgggaaagaaaacttgccaaaaacaaatatcatccgttcaaacaaaaaggaactatataagggatgaaaatcagcacaatctaaaacaaactcgtaatgttaacactaacactcagtatattgagctaaaagacccaaaaaaaacacctagataaaaaggacaaaaatccaaaaaagccatcttcgaatatagtttgagatgatcaagaacacaaagatttaagaataactctctttattagtttaagaaatttactcaaaacttaaactctcaactcataagttataccacatgttggtatctccttatatagagatctcttaaacaatcctaatcctaatcctaatagaactaatatttagataactcataaatattgtttagatatctcctaaagtttctagtcctaatctctctaggatttaatgacttaattgtcaagtcatattcaaactttaactcaacatcgagtgtctgaaaaaaaaatacttgcatggcaaacctcggcagtagagctagaagagctgttttttgctgctggaaactcttaactacaaccggagctcgaggtccagctctgtgtccgagacgagtgagctcatcctatttgcctcttgtaaagcctcgagacaagtcgtctcctcgcacaatttagccaataaatttaggcactcagtcggagctggatctggatctgaaagaacgaaggcgaaaaagagcatgtctggggagtggaaggaccagatccgaagcctagtgcctctctgtagaatgttatcggtgacgaccttgttccatcctaaacctaagacgtagttggaagtggaagtcatatcccatctcttgagcttaagcttcctctgtagacccttagaattcaccacgatcacatccgctcctttgtcactggcactaatctttttgtgatgtctatctattttttctaactcttcctcgtttaagaagtccatatctagtatctgcttccagggcatcataagacgtgtctgaagttcgtcgacatcactattgggaagaaccttcacaaatatcagctttgcatccataccgttcacttctctcatcacgtcaatcagccattccgtcggtgtcctatcttcatctgtcactataaccggctttctgtttcttaccggtttgtttgaaaccactttttgaggcctcttggactctagatggcacgaacttggagaagaagcaacacgattagggttttgttccgggtcttgattcttgcactcatcaatcttcagtcgtttgctcaagctggaattcatagttgtgctcagactgtaattaattaatcttctcagtcttctcagtctctccctccttttatcaccttcagtggatgtttctcctatttcctcatatgcaaaagcgctaaccgttctctccgtcgctacacataaaatatctaacgctctcttccctccctgcaaaccattaagttgatcatctcctctcaccattgttataaaaaatagagagacaagaagaaagagttaagcggcagagaggagtttatagtcttgcttttatatgattctgattgtcaattcctttcacaaacgaacaaaggtatatataactctctattattttttatttttttttgttagtgataatctctatatatttttatattagttttagatattcactaaattacttgcttctattctattggttagtctcttttgttcggttcaatctttaaattcatgtatttatcctcaatttttttttatagagttttaaagttttcgctagggaagatgaagaacaagcaaatacagttattccaaaacagtggcaaattttaaaacttaatataagaaaaaggaaaacaaatttgtagatcatattaagacaaaagaaaaggtcttttcaaacaatatggctagtcaagttctggaatccaaggtttttcacgagagcttttagttggttatgttaaatgctgtcttcattctctgcacaatatgtggtaatgtattgagattttcctcaatggatttgtgcacacaactctccatctcgttaaccgcttcaggccttatcttctggagctttgaggcctcaaacttgtcttgacacaccaccagtgatctgttcaatctttcctatacattcattcaacaaaaatcagtctttatacacagcaaactatgtatcatcttttagcagatatctttacctgaaattgagccatttcgttctcgaaatactgttgagatttgacaacgggaacactgcagtgctcgacgcagttacttatctcctcttgctttcttcttctatcaaagcactcatatgcacatttgaaataagcttgctgcaacaatgatatcgttgtcagggtttaattaatttgaatcaacggatcatataactcaatatagcaacccaaaaacacaagagaaggtgttaataactctcatgcttctgaagacaaagcagagcaattgttatgcaacgagacacgcctacttatcgaatatcctacagagcacaatatagtaattaaaccagagcaattgtcgtgaacctaatccatagtgtctaaagacgaatatagtacgaacccaaatgcaaattttcagacttttttcatgaacctactcaattcatcaaatttgaaactagcattgtatcaaaccaataaagattccatattcagaagctaacattgctaaattgttatatcagagagaatttatgctgagctcgcgaaaagtacagatttttgtatatacctgaagggtgaaattgatgtgatcttggataggagaaagctgagtctgagcagctacattaacttcttcaagctttcttcgaagtctctccgatacgatttgctcttccgccgcagcgatgtgatccattgtcgccttctctgtttagcgtaattttgattttagggctttagggttttagctagctgctctcttcaatagaagatccttcaatagccgcaaacaaaacgggtttgacaattttgggtcgggttaagtttcccgggtttctctaaaccggttaactctttttcaccaattcaaactttattaaacaggaagctaattccggtcattgaccggtccgttaaacttcgcattagaatcaattgttacaagaagccaccacagagttgggattaagcagtaaaaaataacagaaacagccatcaccgacttcaaggtctctccatcaatacatgatcagaccaaagctttggctaattttcattagtcttgagacagagaatttagcagcagctcattgaaagggcgaattagaagacgagagattaaaagcatgagaagatgttggagtcttcacaggagcccaaatatcagcaccattggtttgagcaacttctgatgtatactccaatggaacaagacatagccctttacttcttaagctgtactcttccacttcctcctagttacagagatggaaaatatcagtcttgcattgtgatccaagtaaacgagatccagatcatagattcagctcacctctgtagtagaaggggttgcttgcagataaggagcacttagaacctgaacagagaaaatcaagcataatcatcattggattggaggaggtgaatgaatgaaaagtatttgattagaaaacttgagcagaccttgacttgttcttgaagaaactgaatgtattgcattccctctagaagaactgatgcagtgtcggtctgcatagatagagacttgaacatggctagagaagacaaagagcgtgtaagaaagattatttcggaccaagtagtacctttccgtaaggggaaactagttgttgaagagctgaaatacgttctgctaatttgtctttcctctcctgtttaaaccacagaacaacaaagtttcaagatcattagcatgctggtacagaaatgtccggtagcttcatagccacaatgaattttgattttgatgtatcacaagaccttggaagagaaagagagatcagatgacttgtgtcgtttaattttgttatcttcaagcgagtagacattgcgcttagtctccatcatcatctctgccgagtctctagagtattccattccttgtcatcaaacaaaacaaaaatgatcggtttttcgacataagaaaccggtttacttgctaccatttataaagataatctcatggcttcatccaaggcaagttgcagaaaaaaacataagattacaactcaacaacttgcttttgcaagcgtcataaggacaaaactatacgccttgagatattctcagaccagacaaacaaagtggtgtcttggttttaacatcaaaattagatgttaactactacaaattaagggatgcaaatctaggtttggaccaactaatgcattggaagatacgacttttggattagaaaacaagagcaatggtcaaagaaagtagataatggtcagaggttatccatataagatcacatcagcttaaagtattatttaaagtttagtagcacaatcatagatgtttaaatatgatatcatactttgcttccatacatagacaatacattgtaggatgcatgaaactacggaattaactcattaatttagttcatctaatgagcagaactagttaatcattatacgtgtttttattttggatcgagttagctccattagacaagattcaaagctaagcaaacttcaatagaaaaaccccacaagaagatgagaacaaaaaataccaaaagattcatgattttattttgccttaaaatactctaagttaagtcaaaaagaccaaaaatggggaacaaaacagagtaaatgaagaaaaaagaacttacagagagaagagactcagcatttgccagaaacagcagactaaccaacaagtaacttcacaaactctaaaacttcttggtctaagctctctaaatgggtatttatgtcaccctaagcacaagacacgatgaaacccataaacgaggatcttggtctctctagtgtatatatatttttactttcttttgtcttcaggtcttgaagaaagccattaatgaagccggagctccaacggtgacacgattccagaggtttgtgtttggatgaaaacggcgtcgttacttaaagggtcgtgaaagagaggagttttagttttatgtagagaagaaagcaaagaaaagaggggactacgtttcatatgtctttttcttcattttgtttttcctttcgtcctcttcatttaattctcattaaatctatagatttttttgtgagacaaataaattgttagaatatataatcgtaaaactttattctgtttaattcaaatctcttaatcaatcgaaactatattatatgtgttattcagtactatttgacggttaggaaataattactatagtagtaattaggaagtaacttgaagaatttagtttagtgtatatatttggagttagggaatgtaatggaaatgtaaaaatttgacagctaatgtacaaccaatggtgagagaggtccttttaccagtcccagatagaagtcgctttcattattttcataataaaataataaataagctaataattttgaaagtgacatttgattgttttttatgtagttttgtcaaaatgattttgaccaattcttctgcatctgtcacttctttttcaactttgtgctttttcttgttttgttatcctttctttgaaattttctacgagggaggttggttaatgcagcgtaccctttggttgatatccgagtatattcacattttcaagtttcaacgacacagctttttgtttatatggaacagaatctatcttcttttgtttctccaaagtaaacagctaaatactaacccaaaattgaaaagcataaacaaatagttgaatctaaccaaacaaacagaaaaaacaaacctaactataactaaaaggcaaaaaatataacaacaatattgattacatgcaaaatatttgaaatgtttacaaatgtccaattgatcagcgttccatatcggacccacgcggtttctgaatttgtttctttgccacaaatgtttttcttttgtcttcgcggcgaccagattttggtttaggtgtttcaatttatatctctcttacgtacgtaccaaaatcggcctgtatcaaaggctttctttcccaaattacaatattacaaccataattattatagctccaatgaataaacagcaattatgctaatcaccattcgagcatttcttagcaacaataaggaagatcactcaaatcagaaacaatacggatagttcccaaaaatgcacaaaattaatcaagacattgatgtttaacttacattccaacttcactatcatccaaattgaatgcttcaataagttggtaggtctaacaatcataaaggttatgaaaaaaactccacgcttcattttccatttgcgtatggacgaaactaggtgtattgtatataatatagtctcaaaaatttcaat

SEQ ID NO: 317 - DNA, 100665 bp, Arabidopsis thaliana
gaattccaacttcttattggtaaatttcccaactttactaattctcacttctctgctacaatgggtttcgatttctcccactcaagttggttgctttttcgaattgatttattcctgtagctactagtatttgcttatatagtgtaaaggttagggatttaagagctgaatgaattcattttgtgttcttttatttagagaatcaatgcttatttggaattcttaaacaggttggttctgaagttggttcaggttcagtaacgagaaccattactactactactagtgagcgtttatttagcagtagttatgcagctcatcaagttgatcagataaaagacaatcctgtctctgacatgttgattgataaatttggtcgcttacatacctacttgaggatatctttgactgagcggtgtaatctccggtgtcagtattgtatgccgtctgaaggtgtggaacttactcctaagcctcagttgttgtcacagtctgagattgttaggttggctggtctttttgtttctgctggtgttaacaagattcggttgactggtggcgagcctacggttaggaaagatatcgaagagatttgtctgcagttgtctagtttaaaagggttgaagaatttggctattactaccaacggtatcactcttgcgaaaaaactaccaaggcttaaggaatgcggacttgattcgctgaatatcagcttggatactctggttccagcaaagtttgagtttctgactagacgtaaagggcatgatagggttatgaaatcgattgatactgctattgagcttggatacaatcctgtgaaagtatgtttattaatccttcttcatgttttctgtttgaatgtagcagaacgatatttgatgttcaagagtttttgcaaatcgttcttggttttgacaggtcaattgtgttatcatgaggggattgaatgatgatgagatttgtgattttgttgagttgacacgcgacaagccaatcaatgtccggttcatcgagtttatgccatttgatggaaatgtttggaatgtgaagaaacttgtaccttatgcagaagtgatggataaagtggtaaggtagaattctctcaatgtttagccttttttgagattactcaacttttccttgagcattttcatgattggtttcagttgttatggtaacaggtcaagaggtttccgagcataaaacgaatgcaagatcacccaactgaaacagctaagaactttacgatcgatgggcattgcggttctgtttctttcatcacatccatgacagaacacttctgtgctggctgcaatagattgagacttcttgcagatgggaacttcaaagtttgcttgtttggtccttcagaggtaaagtacatttccaaatttttccatggctaaaagtcagtaactgttgattcaagtggctgcgaacatgtacaagtgtgcaataacttgagtaccggtaaacatgagtattcgtggttgcttctcaataatgtgacgatcattttgtttcgcccgatgatttcttgtgaacaggttagtctgagagatcctctccggtctggtgctgatgatgaggcgctaagggaaattataggcgctgctgtaagtatttagttgcttcatctgattttacgaaccagtcaagaaatctttcctctgtttttcgtttctgtattgacttaaaattcacaatgggtttcaggtgaagagaaagaaagctgcacacgctggaatgcttgacattgctaaaacagctaatagaccaatgatacacattggtggctaagctccggtgaacgtaagttctttaatccattgttatgtaactcataaaaattggatactttgtgtcgattcaagggttttgacacttgatctcagtaacaaagtctttgatgcattgatccgtttagtgtaactctgcgttttgattcacgtgactcatcgcgtcatatttctctttacaggttggtgaagttcctggaaaacactacaaggaacatttgagttttatatcttgtaagaatctatctgctgctcccaactctgtgagactgtgacaaacttttttgcaaacaagaacaagaagactgaagagtttctcaaactgtttcttctctgtatacgtaacagacactgtacaggaactcagaatttccacacgaatcttttcagtccaattacttttcttatttatggccaaaaagatcaactataagcttttattatgttaagaattttaaaatcttaaatttgataacaacaacaaattcacttgcgatattgatcaaagcttattgtataatagagttttgagatacatgacttgtactctgctgttttattagcttacataaaaataggtatcttattaatggcttattcataacaatataatgtctagttttcggtagaaagaagagcacaaggcttcctgcaaacacatttgttgttgaagaatcctttgcatcgaccatcagggaaaccttcgctaatacatactcgcttgcaactcctccatttcaagcacaaccccctgtagtttaagcttttcgtttcgcacaattgtggttgtccttcaacaaccatcttcatacctataagatcatggcattttattattcaataagaaatcaaatttataaccataaatataatcaagaatgaccaaagctttttgtttgttgataacttataaccaaccaatatctttttattgctcctaactcctaatatgtgtttatgtaaatatgtgattttcaatattctatggcaaagtatgagataagttgtagtgttgttttttcattatcataatagtttgaactaaatagtgtatgcataaaaacaaatgttaaactaaacaagggaaataaagtataagtttataacgtatagtttagtagatttgtttaggatttgtatacctggtgcgacaacaagtatgactaggaagaagagtgtagagattaactgcatagagctcttcattttgataactacttgatcaaaagagttaagagagaatagagctcttgatattggaattgacttgtaagaaataatgtgaagaggtctgcattttatagtaaacagaagtataaagcttagttggtaaaatatcaacatatattatttatgaatgtgaatatgagaacaacaaaaacatgtggaatcaaattagtttttcttaacaccaataaatctgatattatttaacaccaattcatatatgagattatgtttatatctcttgagctagtaaaagggatagataattagatatcattgaaaacaatttcttaaaataaaattattccacatcacattctattttttttcttacaaattcactattgtttttagtttttttttgtatattgaaaaatttattattaaaataagtatgttcaatactaatcatatttacaagtaacatattattttaaaacttctcaatacaaattataacgagatttgtgtccatgtaaaacttatatagacagatatacctttctaattacgaattattgatatatatttatctatataatatacacatgtgggtgtcaaatccacaaaagacctcccaagcaaataaggaagtaacttgtgctcatcacttaatgtacatatagaggacacaacatttaggcctctcgtggcgtacaaactctatcaatctcgatttattggccagttacattggtcacgtgttatgggaacgctagttgcacttaacttatgggccacgcgacttctgtgacagaccgacaaatggtcaacctaccacttcagaatttactcactttgaatgtctaaattcgaaaaggtaaaagctggaagaaggatcttaagtacaaaatctcaccaagactcttaatttatctgttagccgatctcttcaaattcaatcgaacactttttttatttgagttttggaaaatctaatggaaaataacatatcacaatgtcagcgtctgaaaatcctgtatctttcatggtccaaatgtttaaagcaatgttttttcttttacaagatgaaattttcctactcttatatttcttctctcttctgatatggtcttatttcctttgcaaattatcaatcattgtttgagaaatatgtattgaattgaaaaatacatttcccttcacgcttggtgaggatgtaaatgtttcaccaaattcaaataaataaaacatcaatcgataaatatgtttagttaaatataaaattactaatcaagattatgctaaatctctttggactatacttcgtacggcacgcttaatactatggaattgatcaacatctaaactaatcatacatatgtacatagagatggagtacttatgaatcttacatcaaattaacgagacaatctaaaagaaaatgaaaaataaatcaaataatgccgtgtagttgttcttgttgctgcctaagatggtgatgatgatgtagttgttgttgttgctgcctcatcttgcgaagaagaagaggacccgttagatgaaggagacatatcgtcgccagcaggaatatcctgaagcgccgccagaatccgacggatgctgactgacctcatcggtcggaaactgtaagcccttttcaacgaattcgatctagcaaaaaccctcgacgatttcaagaggatgagatacaccaaaccttgaactagggcaaataaggcaaccttcatcaacatcgttcccaagcctccatccattggttgtaatagataagaaaaatactcgattataagatttttgatcagacaaaagttaataggtcgtggtaaagatttttttattttttttccgctcttgaggatgtgtcaagatttgaagatgagtttgagattgaagatttatagagaaagagagcgccttgcgtatttgaccagaggcagagacgtggaagtaaaggacatatatcgttcgaccttatccggtcaaatgaaagcacacgccatacatattttttctagaaaaacattgttgctagaacatgtaacatgaaaattcaatattttacgttacatacgaggaaaatatcgatgcttgaactgagttgtggactagtaccttagtccccgggttcgatcctcggttggggcggaatgataaaattttctcataattaaggatactaaatattgaccggtttagtcttaaacaaaagtttaattttcccccaaggccaaaatgaacaaaatataattcaccgtccatagctatttggtgcagataccaaaaaacttggtataataatctattgttattctcgtcataatatatactaagaattattctataccatgagacaaaagattccataaaacggtacaattggtgaatgaaatttaaaccaaaaaaattacatcaagaatccattatactaaacccaaagagaaagtcaagagtagtaaaagaaccaataaacgacgtcatctcattatctaagaggaaaccaacgttcttgaaactgagattgataagaaaccatgaagaagagaaagacaagcatgaaggccactccccacggtgttcctccagctctatacaaagactctctttcgttcagatggatcaaagacgtcatcatccctccgactccttgatcatcggatagaaaatgaacggctaagagcaaaagcagaggagaagccatgagagcaagcttgaactgatacgtaaaaccttctataactggttcgtagctggcgtaccatgagattgttacgaacattaagaggatcaagacgaagacgcagagatgtaagggaactggagggcttccttcttgatctcttcccattatagattcttgattgttgtttaattgttttctattgagagttttctttagatgtgagattttttttttgtagagacttcttgatgtttgagaattgagattgatgaagaagttggaggatgaggtgggttttataaagagaaattaattaacaattaatgtttaatttgcttcggaattcggattctacaaaaatgtaattaaatacgttcttttgtattcagtaatagaaatttaattttatacaatggataacgtaatatattatttaaatttacagataggtttatgaatcaaactggattaagcgagtgttaaatgaactaacggaattaatcaaaataacaatgagaatatgagatctaaatttattatatatatatataactataaatgtaatctgacgtatgtttatttattgatatgatatgatgatatgagcaacaaatttttgtatatatattgaaatacagtttgatataatgaaatattaagttataattttggtacataattgggatcaaaactggacaaaaattgggatcaaaactggacaaaatttaagcttaaaatttcttaaaacatttgttaaaacatttattttttgtcttaaaagttataattgcagaaatctacttttaagcagaaaaaaaaaaattacttggcgtatattttgtgaagtataataatgtttggtagccgaaataaagtaaaagaaaaagagctgactggacactttagttaaagattcttgcttttcgacggtgccacaaggttacttaacatggtcggtgaggccatgcatgatgcatctccaatttaattggtaaaaaagatacccaatgataatatgccacgtactaccgaccctttccttacatctgaggtcacctgatacgttctcattttattttattttatttaaccaacaaaagtctatgataatataagaaaaataaataaattagctacgttgttatttgtgaacaaaaaaaaactacgttgttatgcgtacccgcctagtagtcggtacgatacgacaataaaaactcgataagccggaaaatatgttgtgaaagccctagggaaataaagagcaggaaaattttgaacgacaaagattttaggctatagttattgacatattgtaagagcaacaaacaatatcgtcaaatatagtttcatgatgtcaacttgttacgtattgtctttttttttttgtttaaaaaaaaacaaaaaaacttgttaactattgaatttgagaagttttgtacatttcgtaaactacatgattataaaaaaacaaaaaaaaacaacatccatatatttttaatttagacaaactaactgaatctaacaacgaagaattcaaatttgatactatatatgtttttcgaggatcaaaaactgtctttaattatgttaattattcatgtgacttcttgagtatttactcgttttttagtatatgataaatcatatggatgaactacatagagtgttaaagttatttattacaatgatattttgatattattatatgttatcttcttaggaaatgaatttaaagcatcactaatttggaggttatatatatagctataaaatcgccacgcttctgcatattttatattatgtaatttggattgaaactaagcaatgttgattaaattagaaagaaattgtattgtattacgtataaagtaaaacaaacccttaacattaaaaccaaaaaaaaaaaaagtataacaaaaataatatttgattgactgagaagattacttacctataaactattttaaacatttggcaattagttaaccccgtaactattgtaatggcagaaaatgaggataggtcttagtcagacatcgtcagttaaattgttcatctatgtcacgatgtgtcatctgatatatatgaaaaatacaaaaactcacaactcacaatccgagccacaacacttaaatttgtttcattcttcgtgttttatttttctttaagatttttttttttattgggttataatatcgcgaatattaattggaaaacagaagtaaaacaattatccaaaaacaaaaatggttgtatttaagaacatattttatgttttaaaacattatctttggtttctctttatgttttgccttttctttataaaaaacacttcaaattgttagagctacaaaaatatcaaaagttatatattacaattatgtataaacctaaagttcacctaatcgtaactagttggcaaagaacgactacagtttagaccgttaaaccaaaaaagatcaaccgtaacaccctaagatctgacgacgaaaagactttaacagatttgtttttttggcaaaagctcaaaacacaaagcaaaactcatgtagtgagattcttaacaaaaaaaacaagagttgcatgtatatagtgctaattacaatctcaagtcaaaaccaatatgccaacaacaaacgtgcacatcaataatacgtacgtacgcaaaacattccaaaaaactgcctagtctacagcttatctctaataactaatcgtataatatatatatatgtgatcacgtatatgaaacgtacgtatataggattcaagttttaaaccgaaagaccggcgatttgtggtcacgtttggcctttatcaaaccgctccagaccttaacatatcgacccaccatacctttgaatttcaaaccaccttgcttctctttcttcaccaccaattgcatcgtcggcttgatcccctcgccatcctcgaaatgttgatctagagagctcttgttgttaacatcagcttctccattcaatttctcatcgcatctcatcagattgttcaaactcttacgatcaatctctttgtcttcgatttgctcttgttctttgtctggttttggttgtgagctttgggtgcatattgcatggtgatgcatatcgttgatgagactagaccatggttttcgagttcttttcgacatgcttagatcaaaccgtggcttggtcgggtttactacttcacttcccatggttattaatcatacaaaagagaatctatactctttctttctttttcaaaggagaaaactatatagaggaattaggagtagctatatgtccattttcacttttgaattgataacgtaagaggtcggtgactgtgagtgtttggactactcgttacttaattaataaataaagaaatgattacaatcgtgactcagatgtctattttgtaactaatcttaatttatcttgatactttgggttacttgtagcatacaataaattgaaaccacaacggaccaaatttctaggcttgggttgataatccatacgtttaaaaccgaaattgtgagaatagtgtggatttatctagctcgtgtcgaaaattcaatatagctcattcacttagattgtgtctgtaacttttgtagctcgagcagaaaagaaataggatcctaagattgatacaaacccatctcagtcgccaagctagggaaatgttaagatccgaaacttcttatcatgtacttttcttgtaataaaaaaaagtggaaaaagagataccggataacaaaggtacaaacaaagcaagttcacaaaatttggaaggttggttggagtgcgacctgatgggcgagttggagtgtcaacactcaacacaaacacaggtaagtaaatgattggacacttcacttaagttttctattccaagcatctcccccataaatttgacaaggtattaatcatcaaacaggccttgcatgaaaatattcttacaattattttttctctatagagtaattttagttggacttggcccatcacaatacacgcttaaatgtgtgtaaaaggctttatgatgttaggattagataggtttatgatgacaaaagaaatcttcatcctaatcgcatgcatagtatgttgtaggtagtgtacatcaaatattgctaaaaagtctcacttgcaaatcacaatcggatattacaaaagagacaaaaaggctcgtgctttacacctgcaaccaacaaaagctttttacttgcagcccttaccaaatctcgaagacagagagacaaaactgtttacttttcccgacacagtaaacgacgaactctccacattccccgagacacctctctctctctctctctttgagattccttcccactcttcttcttcttccttctcccaaaagatgcttcagcttcttttcccaccatggcttccctcactcctggagttctctccaaccttctcaatatcgccgccggaaactcaccttcttcgccgccattgttgtcttctcatcgttcaccactcctccaagtcatagaaatcgttccttgtctctctgacgaccaatggcgtagcgaagcattcttcgtcaaagtctctgactctctccacgcagcttacgtcgccgtttccaccggtgatgacgctgatctgatacgttccgatgaaattcagctaggacaattcatttacatatgcggtggtttacacgtcgagaaaggatgtcctgttcctgtaatccgtggtttgaaaccagtccctaagcggaggatgtgtgttggaaaccctagcgatctttattctagcgatttgctgcttccttttactcaggtctctgtttctccgacgacgacgaagaaaaagaatcttgttgaaacaaggagattgagtttggattccgcgagaaggagttgttgggatcaaactcctccggtgactcgtcgtcgtgacgctgcattgcttctttcttcaccacgtcttaaatctaaattggtacacctttcatctttttttttttttttttttttttttctgtgaatcgctctgttttagtggtttgtagggattcttgtcctttaagttgcctacaatggtatgagattgatatatgtgacatgtgagaaaccaacaatactactagactagttttcgtagaccttgaatgttgctctgtgagtcactctgtttgattctttttgttgcatttggttggattgtggaagctgttgttttgagtggtgtagggtttcttgttctttaagttgctaaaatagtttgtttcaggaagaccttaaaagttgtttcttatagatagtacagcaatttgatattggtttcacagttcatacacttgaagtccttggctttcacagatttgtgatgtttttgcaggtcttgaatgataagagtctgctaaagattgagtccccatcaaagtactttaactgtggaacctctcctgccttaaggaacaagaatgtggttaagcctggatcacctatatccatggctagttctccgaaagatggtatcaagtcacctatatcaaagcaccttaactgcgaaacccctgctttaagaagcagatatgtggtcaagcctgcatcacctatatccgtgactaggtctcctaaagatggtatcaagtccttgtcaaaggcagtgactcctccggttgcgctttttaaggtgccttcaagtcacatgacttggtctgatcaaagaatgtcatggagtggactcccaaaaaccattcaattgctcggaaaggtacggtatttggatcaatctaccgactctaagaattcgtagtcatgtctttcaacccctcctttcaggaagtttcatcacataggcaagtagcagtttcggcagcagtaagtgcactggaggaagcatctgccatggagtctgttctatttagtttgcagtatgtcttctctatttcatccctaaccagtttcattacacgagtttgcgagtccttaataatagcatacatatgaatttgttccttcagggcctttgccgagctgtgtgattctactaagaagttatctactggacaagtagtggcccggttcttggacatctaccacaatacacagaatacatgcaaagcggtccatcggttgcttactcaaaatcgaaacaacggctcgtgtagattagtagtaaataaaaatgcaacatcttgggttcaagctgcggtagtgactggtttttctcagttcaacttatttaaagagcctggaaagaaaggtgatgctgctgatcatcactacattgttatgcagaactcatccgagaaactgaaccccaaggagacaacaagttcaagaaccccatcctacaaaggcgcgaaaccgcctgcaacgaaacattgttctgtttcagaccgaagtagcttagaaggtaaaagcagtctgaaggattcaacgagtctagcggatgagctagtccaagtttccagccaatggttcttgaaatatttggagaattcattgaacaaagggtctttcttggtgaagacggaagaaacaaatggaaaagagtctcttctcgtccaccttaaagctttaaaccattggctcgatgatctgaacttaaacagaacagaaacgaacgagaaagtcgaagatttaagaaagaagctgcaacggtttctacttgagcatattgaatctgtcattggggatacttacaatatgaaaagaaagattataaattccatctaaagaatgtatacaatatgggttaagaaaaaacaatcatctgcgcatactgtactgatgttctacttcatcatcctcgtcttccataaaaggcgtagcctcatgatcggtcttggctttaccttggacaggttcttgattgttgttttctgcggtttgtctgttagcagaagagtattgttggaccacaagaaccgaagcttgcattgtgaagtttgatgaaattaatgtatcgcctataatccctaaatccggagtactattccaatctgtcaaccctgaggtcacaggtgtttctacttgatatcctcttcccacaatgtaaagatcgtaagaattgttatcttccagttctaaaatcgctgtgatcgtttcttggccattcttaaccactttctctacataagtcactgatggatcattcatagtcttgaagttaaactcgtagatggactcttcatcgacatgtttatccttctcgtactcgtccgcggcttccccggctgagactaaagcttcctggcttgggacgaatctaacgaccgtgagttgaaccatttcttgtcccaccatcctccaagcgtaagccaaagcctctctgtcgtctcgacctcctaggaatagcatggcgatttctttctttgtggtttcgccttggaacataaaagattcaaaccggacagtcgtcatgccacggtcaaccaaaatcccaaccgaacaaggcgcgtggctcataacgttttggttgatttcagcgtgcactgcgttaccttcatttaaccgaccgtctgacgtcatattcttgtggtaaggcaataaaatgaagcaggcttgtttatcctcggccaacaaacaaatatcttcgtccatcgttgcgtaaggtgaaaccgcggtaatggtctgaaccattaccccgtcgttgttcacttcgagagctgtgaacatctcagcgatctggtcagattccgctctaactcggtcagcaaagttagctttcggtttggcctcatcgttcataatgagcaacgaagccgtggtgcgacccgttagctcgactaggtggatagcaaaaacgttaagaggagatttcttggtcgggttagagagttgtaatagattggttatgccagagacgttagggaggacatggacgcatgtcaatacacaaagctctgactctcctttgtgtttttgaatggttcggtttttatagaaaatcaacttcttctttggtttgtaagcaatggctaatagtggctgcaccaccattgacatcactagaaacgccaacgtcagatgagtgtacataataacgtccaatgccttggtgtctcgtccagcattgagaatgactagtgccattgttcccttggtattcataagtgcaccaatggctaaaccatcacgcaaaggtatacgcaagaaaatggagcaaaacatcgttgacaaaatcttcaccataaccgacgcagaagtcacaaccgccatcattccaacgctcacggtcctgttcatgtaaccaatatcagctcttaaaccgcagatgatgtagaaaagaggcattagcattcccgagaggaaatcgtggagcttctcttcgatcatttttcgaatgatgtggtcatgagggatcgatagaccgaacaagaatgctccggtaattgagtgaaccccacatacttcggtgattaagctgcaaataatgactccagcgagagtgtaccatacgtgagtgtctcccacttgacctccttcgacggtgttgttgaagatccaagccactccaggttggatcacaaagtagcagagaaggacaaaagctatggttgatgctaatgagtatggcaacatttcgttgcgtacacctaacaaattaaatatggttttcgttagtactataattcagtaactatgcgtgtgtgaggaaaaataacacaagggaacaaccatatttagttaccagatttggaaaaaatcgccattccaaaaatgaagagaatccaagtgcacaaatcagtaacaacggctgcacacattgcagtatgtcccatatccgtacgcaagagcttgagatccgcaagaatcctagcaagatcagggaaatttgtacagccaaatgcgatcgaccagtacatacaacctgctaggattttgtcggcctctccgttactgggaaggtagtataagccagcaccggcaagtaaagccgcaaggaggccaacaatggctatgatcactggtttgatgtctttgatctttatcatcctcaagtccaagccgagaccgaggaggaaaacgttgtaaacgagagctaagtttgcgaatgtctcaagaagcattgtatatttataagggaatataagtttaaggaccacttcgttattgccgagcacagtcgggctgaacagtaatccgcactgtaaacaaaataatcattacaattattataggatcatattataaattatgtacgagattaatttgaaaaagatccaataatataaatcgtatgttgcaagtggacaaatcttaaattttttatcattttggttttatcttaaaatcaccgttttcgaaaaaaaaaagaagcaaaaagctgaactttcgttagaacaatgaagttaattgttagcaaaaatttaatcaagaatttgaagatgaagactctttaggacatagctaacaaagaaaaaaaaggaaacataggtttgcaatagttgtgggtaataagtaatgaaaaaaaacagtttaaagattgataatggttagttaaatatgttttcaagattgactactcacaagtatttgagcgacgaaaggaggaagacatagaggcttaagaaaatagtagagtatgcggtaggtaagattagcgacagacagttgcgtcataaagaaaggagctgcggctgaaatggtgttgcttccatgcattgccgtttggttataacatacgactctcccaaaccgcgacgaacttgcatcaatagattcagctgcgggatcggccatttattggggggattttccttaatagatttaaacgggattctctcaaaaaaaacccaaggttttggccttttccctttcacaaaatctttgtgtttcatcatctgttttgttttattgcattaataggtgagagctacacaatctgtttttccttttttttttttttctctaatcttcttctttgtcattgctaattatagtttttttttatgtttgatgtcaaatagaaaagtactagtaatttagctgtctttgtattctcttttgcaaatgaaattagtcaattttggttggttttcttgtttagtctgttataaagggattataaaatccaattacatgctgttttccttgttatcaaataatagtactacatgatatcagtgttttttggatagatgagttaatatctcccttagtgatacaatgatatatttttatttcatttaaggaaaaaggctaaaacacagggttgcacatgtaatcatgatgttcttggatcaagaaattagacagataatgatgcaggtttgaatatttaaagattacttaacaaaactaaaataaaaactttcgaccataaataaaaaaagagagggaaaagaaagccaaacctagctggaaaagttaatccaaatggtccagtctcagaaaccggccttaaccgccaccggagattctccaccggccattaccttcacacaccccagaaaataaataaatggaaaaatatgtaactttctataagatttgacaaagtctacacttttaaggtgatgacttcaagtttaagcaccacacattggtgaaaggccttttggctctgcagtaagagatggaaacaaacgtaaagggcactattgtcttttaatgaaaaagaggaaagaagttcactttcacagcgaaacagtacctggccatggccgatcaagagaaaagttggtgcagtagcaatatcaaaatgtaaagcagacaactttattgttctaaaagcagagatttcacattttgttcaacgtacgaggaccccattcatactcaaaaggaagcatcataaagctttgaaaaggagaaacatatgaagagtgtgaccttacaccaaacagttttctatggaatgcatggttttcaaagcaaatgacctaagagagaatatctgaaagaagttgatttgccgccgcctttactgcatcttaagctctaaaacctgcaaaaaagagttaagagacttagtggagacgagaggtgactaggtgagggaaaagtcactttctaagttaagaatctccagtatcttctgattcagagtcgcctatttttttatgattcatctctttcttcttaccttttcttttgatctatctctctgttctccaactgctgcagattctcagtgtaagagcttggaagagcttgagttatggtaagcctccccattaacctcctgttgcatatactatcttttcttcttactgtgactattgaaaagctttctttgataaataatgttaggggactcctgtaaatatcacactcggatcacatgtctgggtcgaggatccagaactcgcatggatcagtggagaagtgactgaaatcaaaggcaccaatgccaaaatagtcactgcaaacgggaaaacagtaagaaactaatattcattacatataaaaccacaataaatggaaaagattatgatatttttaccatggacctttgcagtaagattcacagatttttctagaagaattttgagaatagattatattattacaggttgttgctagtatttctagtatctatccaaaggatacagaggctccgcctgcaggagttgacgacatgactaaactggcttacctccatgagccaggggtactccacaatctcgattgccgttttgcattaaacgagatatatgtcagtaatttaagacttttgatatctaaaacattccatttatcaaacttttgaaagtcgaagttgtgattatctaattgcaaactcttgaatagcgcagacttacaccggaaacatcttgattgcggtgaatccattccaaagacttccgcatttgtatagtgtccatatgatggagcaatataaaggagctgcgtttggagagctaagtccgcatctgtttgctgttgcagacaccagttacaggtaaaagttgttaatccatgagtagacttttaagcagttactgtaaagaagttagcttaccaaaagcttccattatactagggcgatgattaatgaggcaagaagccagtccattttggttagtggagagagcggagctggaaaaacagagacaaccaaaatgctcatgagatatcttgcattcatgggaggcagatcagataccgaagggagaagcgttgaacaacaagttttagaggtgagttacttgctctgagtttttatctgcgtcgaacaagcttccaccattctaaatttttctatttatagtctaatccagtgctcgaagcttttggaaacgccaaaactgtgaaaaacaacaattcaaggtggtgtctatgaaacacttactgtggacatatttttcctttttctgttggcatcttttgttttgactcgtttgtaatattgtgtgtttccgacagtcggtttggaaaatttgttgagatccaatttgacaagcgtgggaaaatatctggagctgccatccgcacttatcttcttgaacggtctcgtgtttgccaagtttcagacccagagaggaactatcactgcttctacatgctctgtgcagcaccgcctgaggtaagtcttcagtaacaatgctgaaagcaaaagagctggaacaattattggccagacaattctaaatatatgtttgattttcaggaagctaagaaattcaaggtaggagatccaaggacgttccactatctaaaccagacgaactgctacgaggtttccaatgtagatgatgcaagagagtatttagagaccagaaatgccatggacattgtgggcattggacaagaggcacaggtttgtctcatgactctcattctaaagatatggttgtagaaatttcaaatactaaccagagaaacttcaactttaggatgccatattccgagttgtagctgcgatcctccaccttgggaatgtcaattttatcaaaggagaagaagcagattcttcaaaactcagggatgataagtcaagatatcatcttcaaacagcagcagaattactcatgtatcttaccactagacctcgaaattctgcattttccaatggaaatgctgactaattttcaatctttcacttgacgtaggtgcaatgagaagatgatggaagattcactctgcaagcgtgttattgtcactccggatggtaacattacaaagccgcttgatccagaatcggcagcctcaaaccgtgatgctttagccaagacagtgtactccaggctgtttgactggtatgtaaatccaacccctgaaacaaaaatgaatattctaacaatcattaggcaaaagctgctctgccttccacaagaattataatggcgcagaggtaaaatagaaactgcatacacattataggagagaccgaacaaactgcatacacattataggagagaccgaacacacctttaacatggttttccttcaggactctaaataaatagttctcagtttgagcaatctcccaccgtgacatgtgcactaatcaataatgacaggattgtagataagatcaacagttcaataggtcaagacccggatgctaaaagcttgatcggagtcctcgacatttatggttttgaaagcttcaagatcaacaggtagacctgacagaaagtataaacctgaatgatgagtacacataaaacttacgatctaatatcactattcgtttcaaagttttgagcagctatgcatcaatctcacaaatgagaagttacaacagcatttcaatcaggtagaaagtaaaatcactgtaacctgttcacattgcaagcaactttcacatgaaacaatgttttctctgcagcatgtattcaagatggagcaagaggaatacacgagggaggaaataaactggagctatgttgaatttgttgataaccaggatgtcttagatcttattgagaaggtataaactatgcaactaacatcatttatatggatgacattggctccacaacatgtacaagcacaaaaaattatcaatgacatcttcttcttttcagaaaccaggaggcataattgccctacttgatgaagcatggtaagtgtaatcctacttttaggggaaggacagtttcacaatactaatccatagtaagaagtaaaactggctcctctaggcataatcataaggttcacccttgcagcatgtttcccaagtcgactcatgagacgtttgcacagaagatgtatcaaacatataagggacacaagcgtttcagcaaacctaagcttgcccaaacagccttcactgtcaaccactatgcaggagatgtgagacaaacacaattttagacgctaaactgaagtaaatacagtagctagttactaagcacatttttctgtctccaggttacgtactcagcagagcaatttcttgacaaaaacaaggattatgttgtggcagaacatcaagctttgctagatgcatctaagtgctcttttgtcgccaatttgtttccaccacttccagaagacgcatcaaagcagtccaaattttcatccatagggacccgtttcaaggtaagccactagtaagtatatcatttgcacattgctcaagatcttgattcctgacctaacctacccccagcaacaactccaagctctaatggagacgctgaacacaacagagccccattatattagatgtgtgaaaccaaatgcagttctgaagcccggaatttttgagaacgacaacgtcctaaaccaactaagatgcggagtaagcctaaagcctcaggtttcctagttaaacaagttcatgttttcccaccaggatatttactaataccgtatctggataagtgaacagggtgtactggaagctataagaatcagttgtgctggttatccaacgaaacgagctttcgatgaattcctagatcgttttgtgatgctagcaacagacgttccagaggggtaaaaatactcaataaataaaaatctagaacacaggttattagttgtatgctattatcctgatccaatcaacattgagaaaattacattatctattgacagatccgacgaaaaatccgcatgtgcttcgatctgcaacaagatgggtctaaaaggctaccaggtatgtcaaaatcagaatacaagaatgtcagatatgaaagaataaagaaactcaatcctaacagtgtaatctacgattgcattatgattattcatattcagatagggaaaacaaagatatttcttagggccggacagatggctgaactagatgcaagaagaaccgaggtcttggctggtgccactaaactcattcagaggcagatcagaacttatctgacaagaaaagagttccttgggcagaaaagggctacaatttatatgcaaaaactttggagaggttttattcttctaccaatgtctcaatagtaacaccctacccaacacacagctatgaattaatactttaaatcaatagagcagcctaatctgatataatgtcacagaatgattcaaatttcagccaggtaacagtaatctttaaattaactgtgtcatgtgcattgcttatgtagcaaaacttgctcgcaagttgtatcaaaacatgagaagagaagctgcttcaatttgtatccaaaagaacattcgtgctcacagagcaaggaaaaactatactaagctccaggcatcagcaacagttattcagactggtttacggacaatgtctgctcgaaacaagcatagacacagaagaagaacaaaggcagcaattataattcaggtactagattttgactatttaatcacacttcttatttctctatcaaaatatcatatgtctccggacttgtcttctataatctgaaactagttatattcaaaagcagtaaccattcttatttcaaaatttggattactcttcacgcataagggatcaagattttaataacttttgcttgattaatcagacgtcaaacaatatggttattcctacttttctgaggattagatagtacggtgatgatgattttgataaattttatgacaaatcttaatgacatatcttctaacagagggaatggagaagacaccaagttcatgaagcttataagaagcacaaaaaagcaacattagcattacaatgtctatggagagctaaagtagctcgaaaagagctaaaaaatctcagaatggtaagtttcattgataagagggcactttgagtgattaatctcataagaatcaatctaatctgtccacgaggcaggcaatggaatgcaaaattagaaaactgcttcagtctaagttactaacaagtaacaattaatctttccaacaaaggctgccagagaaactggggcactaaaggaagccaaggacaagttagagaaacgtgtggaagagctaacctggcgtctcgaattagagaagaatcaaaaggtattgtcaacaacattagaaactggtccttggaaaagttccaaatgaagcccatgcttaattgtgtcattaggctgatctcgaagacgccaaagcacaagaaatcgcaaaactacaaaataatttaactgaattgcaagagaagctagatgaagcctacgctgcaatcatacgagacaaagaagcagcaaaattagccattgaacaagctccaccaatcatcaaagaggttccagttgtagataacactcaactggagttactgaacagtcaaaacaatgaactggaggtaagtttgagctacaagttccactaactagcagatacttttcctgatacaatatcttcaaaatgtaggttgaggtagctaaattaaaaggaaaaattaaggagtttgaagtgaaatgttttgcacttgagaatgatagcagggcaagtgtaactgaagcagaagatgcaaaatcaaaggccgtcgaatttcaagaaatcatcgaaaggtatacatttactaattgcttaaggcatttgtaatcatatttctgttctacagtcagagttcatgagtattgattgtaaattccagattacatacgaacctgtcaaaccttgaatccgaaaatcaggttttgcgtcagcaggctttggccgcttcaacaagcgttgaagagattggagagttaaacaggtacggtcctgtgagctgagcagttttctcagcctagtagattctttttcttctatcaggcatagctgcatggattttaaaatttttagtcgacctaaattataaaagatgaaataaaaatatgaaattgtatctgatatcactgtatatctgaaagaaaataaacctcttatcagcctgaaggataaggttgcaattctagagtcagaaaatgaaactcttcgaagacagacagagtctgcagaaaagacaatgcctcctgcaagagtttttgcgtctgaaaaggtgcaaaacttccgtcaacataaagttttctaagtcaagaattatgtatataacaatttgcaataatgtaatataactgtgcagaatcttgaaaatgaacatcaaacaaaagagattcaggcaacaaaggtacgatatcttgttagcccaattaagaaatagtactctacagtttctcatcccttgctatttgtttcaggagccaaggaatccaatcaatgtgttagcaaaacaagggtctctaacagataggcaacaggtattattcgagaacttgtttgtactaaagagctataagttgataaccaacaaaagcaagcaaaatatatttccatatctgtttcactacagaacaaataataattactattactggacaggagagccatgaggtgcttatgaaatgcctcaccgacgagagaaggtttgataacgaaaaatctgtggcagcttggatagtgtacaaggcattacttcaatggagattatttgaagcagagaaaacaaacatatttgatagaattgttcataagattcgatcgtccattgaggtaataatttaaaggcaatgactatgaaagtagtatctgaaccctctgaaacccgaactttatattcaagttatactaattttggtccagaagggccaagatgacacaagggaactagcttattggctcacaacaagctctaccctcttatatcttctccaatctacactcaagttcagcaatacaaataatgcggcttcaagacgtaacagatcatcccatgctacactatttgggagattggttcaagtaagcttggtaaagtgaacctccgattaatccattttttaagagcctcagtaatagttggtaacaacattgtagggaatgcaaccatcttcagtgggattggaaacatccagcggttacagtgggatggctggaataccaaatgaccaacagatggtcgaagctaaatatccggctttactattcaagcaacacttagcagcatacgttgagaaaacatatggaatgatccgagacaaattaaagaaagagataaatccattactaaatctctgtatccatgttagtacatcattcatcaagttaatatggaactcatcttaaagttttgctaatcgcgtatgttaataatgtgttatatgtgagatgtaacaggcaccaagaccaacaagagccaaaaccttgcgagatgtgactaaaagcatccacttgaccacaattgccaagcaacaagcatcatatgtacagtggcagaacattgtcaacaagcttgaacataccttgacttttatggcagagaaccatgtaaaacaatgcactttcgaagatttccagctcaagcttaaatttgtcttttcctgtttcttgactgagccttaatgatctccaggtcccatctatgatcacaagaaaactcttccatcaggttttctcgtacatcaatgtgcagctctttaataggtacaaaaatatatcgcataggacacaagtacctatgtttggttatgacgtagcttgacttgtaaagtttatcttctggcagtttgttgcttcgccgagagtgttgttcagttagcaatggagaatacctaaaaatgggcttgcatgaattagagcaatggtgcctgaaggcagatgacgaggtaggctataaagcattaataaccaaatcatgcaaagatgaaaaataagacaaaagagattaacttacataattctgttcttttttgtctcctacaggcaacacgatcaccatgggatgaacttcaacacataaggcaagcagtgatgtttctggtatagcatcgaaccatatctgttggttaaagtacaaaactagtgaacaaaattcgatatttgatatacactatcactctacaggtctcacatcaaaagacacagaaatcattggacgaaatcgcaaaagagatatgcccggtaaagaccttaaaccaaaaatttctgcagagcatatagaaggatcttaatatgacacaattatctattagtggttactcctgaaacactatacagttggatacatgagcaaacgggtgaaagatcttatgaaagtaaaagcatctagagaatgacaagatggcataactaaaccatcctacatttctacttccagtcactgtcccctgatttgttgatttgttgctcaggtactaagcattccacaagtatatcgaatcgggactatgttttgggacgacaaatacggaactcaaggactctcccccgaggtaagtaatggatcaacctaactaactccagaaattctcttcaaacaccatgaaccaggattgtatccaaattacacaaaactaagattgggctcatgatccaacgatttgtgccgataataggtgatcaatcagatgaggaaactaatgacggaagattcagcgaacatgacttacccttctttcttgctagacgtcgattcaaggtacgcaaaaaacaaaattctcgctttcttctcagtttctctccctaattactctcaatgcatgtttcagcattcctttctcagtggaagatgtttcgcaatccttccacggcggtaacattagcctctccgacgtcgatccatcgccgcttctccgccagcgatctgattttcacttcttattccagacattgccggaataaaggaagagaaacgtcggagagaaacttctctgtctcatagaaggttacaacagctgagaatcttttataatttattaattaagccacgaattttccatatattacagaaatggaagcttttcaattttttctttcaaattttttttttctgtcacatgaagcaagaagcttctcctcttttatgattcctttaatttttcatttggtttggggttctttgctttttatcacttaaaatttacattgtgtatagatagagttttgattcatatcgtacatggtatactcgtttttgatacacatgatgtaatgaatattatatgtgttaatgtaattggatttgtaaaattttgaatttgacacaaaaggaatatcaaaaaaccaatcagtgctacatttggtccttattaggataatttgtggatctacaattttttttcccctttaaatataatttaacattaaaaaaacactacttactaatataatgatttgtattagtattttcgttgattcgttgtattaccatctgaatttagattcacaaaatgcatattgttgacaaaaaatgaatgttgaggtttgtgcacttcggattagtacttgattccatatgtgtatgatcaaagccgtcgacgagactaagctaataaaacttctgtttgcggctattttttgattatatacaagattagccatatttttagcaaaattattaatgtagattagtggcaaaaggcatggtggcatagtttgggcatggtggcatagtttgagagtttgagttttttacctctattttcattagttttatcaatttaaatcatgatagtaatatctaaaattatttatttatccaaacaaaatagtgggcatgttctataataaggcgatttttgagggatcactaagataattaatggacatcttttattagtgctttggtttgaaagcaaactcgctaagctagcaagagggtttagctaaaacccactctctgttaaaaatcacagcactgccattaaaattctcagatagaagaagatggagtgtgtagttccattccggcgatgcttctgtctcaatccgccggagacacgccaccgtatcgttaaccacaaccaccgaaatctccatatttctctctcctcctcctctttcgcatcaggtcgtcatttcatttcctcttctcttcttagtcaatcaacccagctttatatcctgactcgctcttacgtcaattccagggattttgcctctttctaataagaagtatcgatttgttggtcctctagcacagaggagttccttgcatcgccgtacggactctctcaagcaccttcctttttccgtggttagttctcagaaatttcgttttttttttttccttttcatttcagagatacttgaaattttcatataagtatgtgaatgaggagttgttgtggttgcttttattgatttagtcttcatttgtatgtgactcatgatgtggaaggttttggtccttttggataaggttgcagaaacaaatttatctgtgaattctaagcttgagtgttcacatattgtcttggtgttgcttcagaatgcgtctgtgattggtaactcggaggaagaagtggaagaagaggatgatgatggggactgggaagcagagtttctcggggagattgatccgttggatattcaacctccgaagaagaggaaaaagcagaagaattcgaaagcgcttgaggacactgaagggatggattggtgtgtaagggcaaggaaaattgcacttaaatcgattgaggcaagagggttatcttctagaatggcggaggtgatgccattgaagaagaagaaaaagaaaaagagcaagaaagtcattgtaaagaaagacaaggtcaaaagtaaaagtattccagaagatgattttgataccgaggacgaagatttggattttgaagatggatttgtggaggataagatgggggatctacggaagagagttagctcattagctggtggaatgtttgaggaaaagaaggagaagatgaaggagcaattagctcagaggctatcccagttttcaggaccttctgatcgtatgaaggaaatcaacctgaacaaagctataatagaagcacagactgctgaagaggtattggaagtaactgctgagacaatcatggctgttgccaaaggtttaagtccatcacctttgtctcctttaaatattgctactgcacttcaccgaattgccaagaatatggagaaagtttcaatgatgagaactcgtaggcttgcatttgctcggcaaagagagatgtcaatgcttgttgctcttgcaatgacatgtctaccagaatgttcagctcaaggcatctcaaatatttcttgggcattatccaaaattggaggtgaattgctatatttgacagagatggatagggttgcagaagttgccacatcaaaggtgggtgagttcaattctcagaatgttgctaatattgctggggcgtttgcttccatgcggcattctgctccagaactctttgctgagttgtcaaagagggcatctactattatcaatacctttaagggtcaagagattgctcaactattgtggtcatttgcctcactttatgagccagctgatcctttgcttgaatctttggatagtgcattcaaaagcagtgaccagttcaagtgttacttgacgaaagaaataacaaactctgatgaagtagtggatgctgaagtaagcgatgatgtttcaagatctccagcacttagctttaacagggaccagcttggaaacatagcatggtcttatgctgttcttgggcaagtggagcgacctttctttgccaatatatggaatactttaaccaccttggaggagcaaaggctttcagaacagtatagggaagatgtcatgtttgcttctcaggtgtatcttgtgaatcagtgcttgaagcttgagtgcccccaccttcagttgtcactttgtcaagaactcgaagaaaaaataagccgcgcaggaaaaaccaaaagattcaatcagaaaataacctcatcgtttcagaaagaagttggacgccttcttataagtacagggcttgattgggctaaagaacatgatgtggatggctacaccgtggatgttgctctggtcgagaagaaagttgctttagaaatcgacgggccaactcatttttcaagaaactctggtaagtgacatcactctgtttcttaatatatattggtgtctggtggagccaacccaaacttaatgatcatttcgactcttgtgttctacaggactaccattagggcatacaatgctgaagcggcgatatgttgctgctgctggatggaaagtggtatctctgtctcttcaagaggtgggtctataacgttgaaaaatggaaactgatataaaattgagttgctaggataagaaattgtctccatttttagaatacttgttctgttcaatagtaaaaagatctcacatgctcttgcataattgatatgttttcccatctcaatcaggagtacatactgaacatgtgttgactttgtttttattatttttagtgggaagaacatgaaggcagtcatgaacagctagaatatttgagggagattctcaccggctgcatatagagaagacaagtaaccaaacatgtaatgtgttgtcattttaaggttgttaatcaagtgttcttttccgttatgtatatagctaagattcttatagtagattgatgatttatgtttagagcaataatcataattgaaatccatttaaattttacagtcgccattacaaatttctgccaagattgtgttcatagttatttcgtatgcaacaggaatctaggaaatatagatagaagcaaacaatacatattgaaacactagtgcttgatctgggacaacatggtcctgacatctttactgttcggcctctgttttggatcatccaaagtacagtaacaggcgatcttcagaaccagaagcatctgttcatcgaatccttgatccatcaacttcggatcaatcgcaaggctaggattttccgatgttattatgttcctcatccactttatcagactcatctcgtcagtatgctgaaaaaactcatctgaaggaagcttcccaatcaccagaatcccaagaatcactccaaaactatagatatcacatttatctgtgaacttgtgggtttgataaaactctggtgctatgtatcccacagtacctgcaacatgcgaggttgtaatatgtgtgactgcatctggcattgcctttgccagtccgaaatctgaaattctggcttccatgtcatcatcaagaagaacattggctggctttaagtctctgtgaatgattcgtgggttatgatccatgtgaaggtactcaagccctgcagctatacctaaagcaatcttgtgcctcgctggccacattagttcttgatttccagcttgtacgtcagtcaatatatcttgcaaactccccttttccatgtactcgtaaacgaggtagtggcactcgggtcttgacacgtgtgctaacaatgggagaagattccggtgccggatatggccgactgtgttgatctcggatctaatttgcctcattttcttgttcagaaacttggaatcttcatctgttagttcatcggcgtctttaggcggttggatcactttcttcacagctatgatcttcccattgcttcctggtagttcagctttgaaaacttctccacaacctcctcttcctatgatctccagagaagctaacgcttcttcattctccaagaaagctaaatcttcagctttcttgatcaatgggctgaatatggaaggacctggtggtttttctgatcctcttattgcttgaataatcaatttgaacaacaccgagaagacaaacccagagattgttcctcctatggctccaacgacaaaccctaagatccatgccgctactttcttcttcttgctcttcttcttcttcttcttcaacttccctggttttggagctccctttggagcttttgatgtagtgctgttgttgggtttgttcgtgggacttgaagttggagtttcagcaagaatgtgtcttgtttgatgtggagatgtctgaagcttgatactgctcataaccggagccggaccttccaaataccggtttccggagaaatcaaagaaccggagattgtggaacgacacaatttgttccgggattttgcctgagaagagattgtttgcaacagagagattctccagattgcgtagattcttcaagaaattcaagttcccggataacttgttcgaagagagatcaaggattcgaagacggctcaaactagaaaagtttcccggaatctgaccggaaaatctatttttccgaagatcaagaacttcaagttgcttacagcttaagatatccaccggaacagcgttgaccaactggttattagacaaagtaagttccttgagctccgacaacattccgatgaccggagagatagtccccgtcaagctcctggatcggtagacgagcctcgtgacacggagaacgtattctccggtggtggcagagtgccgtctctcgcagaaaactcctcggcgaccgcaagggttgacatcactggccgaagaacgttgactgttgactccgagctctgtttcgatgacctgaagagctttgagatctgaggaatcgatatcgagccactcaacagaggagacgaatgaagagagaagaagaaaggagagaacggcgaggatgagaggccggagaaagagattggcgcttcccgtgggaacagccattttaattagagaaagtttcttcttgtggatgttgtcggagtctacactctgtctatttatggtcagcaactggtactaatctattgagaaatctttacgtgtttcgtggttttttttttcttctaaaactttatttttgaagtgacaaaatatatttgacccaaaaaaaataaagttacaaaatatattcacaagttaatttcttaatattgttatacacttatacatataattggtaaacttaaattaacagtttgaaaaatttatggtttgttcaagggatccatccaagccccggtttcatatcgaaaaaatggggttttctattgctagtattttatttgattagtttgatattaatgatagattactgaattcttacataagatctcctaacaaaattgtattttatattatgatatttagttatcaatggttttggagaaacattgattcagcgtatactttttgaattatttgtatattcttaataagagttctgtttttaattaaagtctaaagaagaaaaaaccattataaaaactgataatcctgacctgtgaaatgggctaaattgtacattttttttttgatttaaattcttccaggaagttttatgggaaaataataaagtagaaaatgtgaatatagaaagttgcaaaactgtattattgatatagcgaattttgttattgacttgactatgtaagcgttgataagtcaaagtctacgctgtgggttccatagtgagccaccgtttcctacacgttagaaaaaaataaatgttatgttacacacaccttctattttccagtcactttcttttagcgttttccgtcaatacgttcgttgtctgtatcaagattccaaactggtgagtgtgaaataactcgaaactggcttttaacttaaaatgagttaaccagatagctaacgaggatgttattgccactaaaccaatacattaccgatatggttcaagttccaacttcccggttctacaaaaccggtttgcctttcgccttcgcactcttgacttttttagattttttactccgggacttgagtatcttctagcggcagcagaatcttgtcgcagaagcgattcgtaaacctgtttcaaaagcaattgagaacagctgtgagattagaaaaatcgaaaaatggagaatcgcgaagatcttaactcaattcttccgtaccttccacttgtaattcgttcgtcgtcgctgtattggccgccgcgtgtggtggaggcgttaaaggcaatgtctgaaggaccatctcacagccaagttgactcaggagaggttctacggcaagctattttcgatatgagacgatccttatctttctctactctcgagccatctgcttctaatggctacgcatttctctttgacgaagtaattatctctttttaactttatggtgattgcttttggatttgagtgtatcttcaaatcgaattgagtagtggaactaagtttttggtactcgcagttgattgatgagaaagaatcaaagagatggttcgatgagattatcccagcattggcgagcttacttctacagtttccatctctgttagaagtgcatttccaaaatgctgataatattgttagtggaatcaaaaccggtcttcgtttgttaaattcccaacaagctggcattgttttcctcagccaggtattgatacaaagtgctatctcctacatttgagctaaaggtgtttttttggttctattcctgactcttgagtagtgatttatggggaggaaattacgtcgaatatacatgtgttcttactggatgattaccttgtgtgttgaagatatagtctctatggattcttgcttttcttactggataatgaccttgtgttgaatatacatgtgttcatactggataatgaccttgtgttgttgaagatatagtctctatggattcttgcttttcttacctgtccgttcgaacttcaatattgcaggagttgattggagctcttcttgcatgctctttcttttgtttgtttccggatgataatagaggtgcaaaacaccttccagtcatcaactttgatcatttgtttgcgtatgttacctctctgctttctcttctaaacctttcatagtgattaagcctacattagtctggtctggaagaaatgcctaatgttaaaatgtcagtcatttggcttaagtcatgaatgatcaagcacgtatgtgaaagaaagggaacctttaatatgtaatttattgacattcacactcgagagtgagaaagcaaatccgctagagagcgcatatgggcctcagtctccattgggagttcactagttagacttggattagcttgttgtgagaaaaaccacatatttctatgattcattggctatcatgtgcatgtgaagattttaattctgaaaattcttgtctaccgtgcattgagtaagtttcatttggattcttggacttcgtatgcccacagtctgatatccgagttttacttgcttttcagaagcctttatataagttatagtcaaagtcaagaaagcaagataagatgtattatgcattactttgaaaggttttgctcctgcgtgcctattggtattgtttcatttgaacgcaagattaccgctgctcctgatgctgatttctggagcaagtctgacgtttctctttgtgcatttaaggtgacaaatattggcttgtggatttctgtaccttgtaatattaaatctgcaaatgcttgtacattactttttgctgacagctttattgttataggttcactcttttgggttaattgaagatcaacctgacaatgctctcgaagtggactttgcaaacaagtatctcggaggtggttccctaagtagagggtgcgtgcaggtttgagatcatattacattttagatttcacaagcatacatgattcttgagttcattttttttgtcaaaagatctattgtaaatcaatggtttaggatttttcattgacttccaattggattcttgtccaggaagagatacgcttcatgattaaccctgaattaatcgctggcatgcttttcttgcctcggatggatgacaatgaagctatagaaatagttggtgcggaaagattttcatgttacacagggtgagatttggtagttttgtagcattggtctgtgtttatttaatatattggctgataagtctctgtattttgatacttttacataccagtaggctcgtttcagatcagtttgtacaaatcctgattgaggcatgttgacaaatagtaaaagaaatgtacgtctagattattgcttatattgtaggtgtgcttcataaataagggtgataactatgtattgctgacttagaaatggccgatagtagttggcatctaaattatcaagttttgaagaaaggttagttatttgtagttatttaccttttttttctatgatttttgtttctacctaggtatgcatcttcgtttcggtttgctggtgagtacattgacaaaaaggcaatggatcctttcaaaaggcgaagaaccagaattgttgcaattgatgcattatgtacaccgaagatgagacactttaaagatatatgtcttttaaggtatgtgaaaccttcttttggggattcataggtttttcagacaatccacagtttgtgtctatacaacattttggagtcttgctactaagttctttctatactcttctattctctttccacgtgaaatttaatgtctcctcctctttctgcttttttcagggaaattaataaggcactatgtggctttttaaattgtagcaaggcttgggagcaccagaatatattcatggatgaaggagataatgaaattcagcttgtccgaaacggcagagattctggtcttctgcgtacagaaactactgcggttggaatcatcctacaaacctttagtaccttttttcatttgtagccaatttgaattagcttttgaaaaataatgtttcaactttttttgttgttctctactgtttctgatgcagtcacaccgaactccactaaatgatgttgagatgaatagagaaaagcctgctaacaatcttatcagagatttttatgtggaaggagttgataacgaggatcatgaagatgatggtgtcgcgacagggaattggggatgtggtgtttttggaggagacccagagctaaaggctacgatacaatggcttgctgcttcccaggtgcttttatacatcatcagctaaaagtaatgaaattattattttcctggagtatacaagttgagtaccagtaggccataagaataaaaacatatagatctttctatgaaaccacagacttagtctgttttgactgtaagaaacactccattgtcacttttgacttaatttttctagaatgaaccaaagcttcgacttggatgatgagatatatagcgattttcatttgatgcttctttcttaactcggtcatggctatatttcagactcgaagaccatttatatcatattacacctttggagtagaggcactccgaaacctagatcaggtaacctccgatactcttttaaacttcacaattctagaacctctcttacagtgtcttctttttctccactgacattttacttagaattgggtttgtagtaagcggatagagcatccagggtatagtacttttaaggtcgtctgtgaacatatcttgattttgaaactgatacatactcttacaaggataggtgacgaagtggattctttcccataaatggactgttggagatctgtggaacatgatgttagaatattctgctcaaaggctctacaagcaaaccagtgttggcttcttttcttggctacttccatctctagctaccaccaacaaagctatccagccgccttgactctgcaaattctccttcattaacttgtttgatgcattctcatactgtatctctgcattttcccacatgggtgtgtaaaagtgattattttcctcttacaagcttgaatccgttgtaagctcgccagttcttgacctcaagcgtaattagtttagtgcgtttgctgatttatgattttggtcaaatgtttgaatcaggcttttgttttaaagaaaaaagttctttttgtttatcagttgaaattacagggttatgctggaatcttctgggaaagttagtccgggaaaagtttatggtccaccaacattttgttgtcaagagtaaatttgactcggtctttctggaaaacgtgttcctgattgactttggtgccatctgttaaaaagaaaaatcaaatgggtttctttgtccttaagctaccaacggactaagtcatatagagatacaacatcaaatgtccatatccttaaatcatttgcaaactttcatctcctaagttttctaatctccttttcaggcaataaggatggaactgagggcagatcttaggtcaattcttcagtatttgcctcttgtggctcagtcttcatcactagtttggccaccttctgtcgaagaagagctccaaacaatatctagaggaccgagtgagtcaatggttaactcgggagaggctcttgccttgcatatcacgaatatgcggaaatctctctccttgaatgcatctgatctcgccccttatgcattacaagggtatggtcttttctttgacaaggtaacaattcctctgtccttctttcatccactttcttagtgttttgtgtttttcttattcattttactcttagggggaacatttgtcatggagcataaagtactcacaaaaaaatttcttcttgtgatgcagaaaatttccagagaagagtcggcaaacttttttggtgaggtggttcctgcattgtgcagattacttctccagttaccttccatgttagaaaaacactatcagaaggcagaccatgttcttgatggagttaagtccgggcttcgtctattaggccctcaagaagctggaattgtgttacttagccaggtatactctttcagtccaaacaaagacatgccttgtgttgcattgaattaaagattgatatagtaactgtctagtactctttgtaaatgaaattttgcttgatttttgaaaccaagcttcgttcctttattcttcaactttttcaccccttgatgtattttgctaccttctgcaggagttgattgcagctcttcttgcgtgttccttcttttgcttgttccctgaagttgacagaagcttaaagaatcttcaaggaatcaactttagtggattgttttcgtatgtgtcttcatcatatttcttaaaagttacaaccatatatgccccaaagtcacaaatctttcttgtgtttttttaaggtttccgtatatgcgtcactgcacgaagcaagaaaacaaaataaagtgccttatccattactttggaagaatatgtcgatggatgcccaccggctttgtttcatttgagaggaaaattcttccactggaataccatcctcactttgtttcttatcccaaggctgattcgtgggctaattctgtcaccccactttgctccattgaggtatcatagaaacactcctagttaagccttcttcgccgttgaatccatttctttcagatgattcatgagtatgctttaggttattctccttttgatccattttttattggagtagattcacacctcgggagctatagaagatcaaccttgtgaagctcttgaagtagattttgcagatgagtattttggaggccttactctgagttatgatactctacaggtctgacttgtacttccttttcttccatctcttctaaaaactctactatctcatccactaaataagttataagtttttcttatttcaaaatatgttgaacatgtcaaaatatacctatgtaggaagaaataaggttcgtgatcaacccggaacttatcgctggcatgatctttttgcctcgtatggatgcaaatgaagcaattgagattgttggtgttgaaagattttcaggttatacagggtaagtaccaatgaactgaagtagatgtgtttattgggtcttcaaagttgatattaagcttattatatagtcttctctctaaatccaactcatggtggctccattcaggtatgggccttcgttccaatatgctggtgattacacagacaacaaggacttagacattttcaggaggcgaaaaacaagagtcatagctatagatgccatgcctgacccaggaatgggacagtacaaacttgatgccctcattcggtaatcaaaacttgtctttcagccagtttttcattctttccttttttttattttgtttgtgaattactcaattgctccttttgtttctgtagagaggttaataaggcttttagcggatacatgcatcaatgtaaatataatatcgatgttaagcatgatcctgaggcatcatcttcggtaagaccacaattatgctccatacatgaatttagcatacatgttaagcattttgtttttcttgactagaccaagattaaatttgttttcgcaaagcagcatgttcctcttacatcagattctgcgagccaagttatagaaagctctcatagatggtgtatcgatcatgaagagaaaaagattggtgtagctacagggaactggggctgcggtgtgtttggaggtgatccagaactaaagatcatgcttcagtggcttgccatttcacaggcatgcttctctgttttcatcaacttatcttacaaaacataattatcattctatttaactgcgaaaacaatctcgatctactttctctagtcaggaagacccttcatgtcatactatacctttggcctccaagccttacaaaatctcaatcaggttattagaatcctaatttattaaacaatgaaaccactctttctcccatttcaacactttaaaaacatgctctatacatatatgtgtgggtgttctttcaggtgatcgaaatggtcgctttacaagaaatgactgtaggagacctatggaaaaaactagttgagtattcttcagagaggctcagcagaagaacatggcttggcttcttctcgtggctcatgacctcactgtctacctagagtaaaaattgagtcaaagttatataaaatactattcttgtctgaattatgggaaatgtattatccatatctctgtttgtttctgacatattaagtctaaagcgttagattgctaatccattgtagtgaagtcaaataatactcatgatataaagtctttatgtaatttggttagttccaatcttacgaggattatatatcttgtgaaacaaaggtaagtgggaaataaaacttgccaaaaacaaacatcatccgttcaaacagaaaggaacgatatagggaatgaaaatcagcacactctaaaacaacagcactcagactgtctacactaagaccattaactaaaaaccagtactcagaaaattgagtttaaaagaccaaaaaataaaataacacctagataaaaagaacaaaaatcctaaaaaaccatcttcgagagtctgaagaaaactacttgcaaggcataaaaaaaaccaaaaaaccaagagaaactaatcacataacatagctgtttttgccaggaagtgacaaccggagctcgaggtccagctctgtgtccgagactagtgagctcctcctatttgcctcttgtgaaacctcgagacaagtcgtctcctcggacactttagccaataaatttaggcactcccaatcattatctgcatgaactggaagtattctgtcaccctcttcttgagcatcagcatgagatatatatagctcgtcagaatctctagtaacaaccggaggcgaagatggagttggagctggagccagaaggatagccagagttggagctggagctggatccagaggaacaagagcaatatatagcttggctagggagtggaaggaccagagccgaatcctctggccttcaattagagtgttatcggagacgacctttttccatcttgaagccaagacgtaaatggaagtggacctcatattccatctcctgagattaagctcaagtaacttgtccacgatgtggcacatacaagaaaggttaacccacatttttgaatggcttccatcattatagattggactgggcgtttcttcggttcctttcggttcttctgtttcagccccttagaatccataagggatatatctaggccctcatgtaatctctccagagctggtactagaaccggaaatatgcgcaccatcattctatgtccaatccattttgttgtctcttactgtcttacattaaattattcataaagcttctttaatcctttcttatgatttcaaatttcaaatagcagaccgaatatatcctttgaataattgattaatcagagtggtgagctgtagaagacatgagtttgtctgaataatcctttccacgtttcttgatctccaaggaatgatataataatctaatctctatagtcagatataagaacatgaaagtcaactgtgttcgttaggtatctatatatctatgttttgtatttcattcttcagaaagaaacctgcaatctcaacttgagaagcaagagaacagagcaatggagaaaagagaagatcttgatacaattttaccttacttgccgttaaagattcaagattcgtctctgtcttggccatcaacacacttggtggaggttttagaagctatgaccaatggaccaagtcacagccgagtctattcgggacaaactctctctgattccatctctcttatgagacaagctctctctttgacttctcatctttcttcttcagcacttcaaggctacgctctcttcttcgacgaggtaacaaaaaaaatcaacattttatttcatccttttccgttttttgtggactgattcagtgaaaaatgtattggtttggtgtagagaatgtcgaaagaagaatcaagcagatggtttaacgagtttttacctgcaatggcttgtcttcttctgagattcccatctctcttggaatcacactatctaaattcagacaatctcatcaatggaaccaaaaccggtcttcgtgtcttagtccccaacaaagccggcattgtgttcctcagccaggtatatcttccgaagtcctaacacttcaatacagaaacagagtttgaaatctcgaatttcatttttgtttttggccatggcaggaacttataggagctttgctttcatgttctttcttctgtttgttccctgtcgatgatagaggctcaaatcatcttccaatcatcaatttcgacaaactattcgggtatacattctcaaacaaatttcattttcaaaatcaagattcaagatctggtgttgacctattgcaggagcctaatcaacacgggaagaaatgagcatcaagagaacaagataaagtgcataattcattacttccagaggctatcttcaagtatctctccagggttcgtctcattcgaacgaaagattctctctttagaacaagattcttctactcttgatgaagggttttggggaaaatctactgtcaatctctgccctgttgaggtaatgaactaaccagatgagatattctcttggctccgtaaagattttgtgtttaatctacagttttcaatggtgtaggttcgtacttctggtttgatcgaggatcaaagcgtagaagctcttgaagttgactttgccaacaagaacttaggaggtggcgctcttcgcaagggatgtgtccaggtatataaaaccctaaacctaaactccttttgatcttgtgaagtttttctgatgtgaatagtttcttgataaacacaggaagagattagattcatgatcaatccagaattgatcgttggtatgctctttttaccaaccatggaagtcactgaagccattgaagttgttggtgcagaaagattctctctttacacagggtacatggttcgatctgtacttttgagttatacaatgtgtgattctgaaaaaatgttgttaaaatggtgttctatacactctgtagatattcatcttcgtttcggttttccggtgactacattgatacaaaggaaacagatgttttcggaaggcaaaaacgagaatagtagccatagatgctctgcgacacccaggagtctcccaatacaaacttgaatccctcctcaggtaaagttgaatcataacttcttacaattgtcaacactcttattataaaagtgttctaatcctttcttcttcagggagaccaataaggctctatgtggtttccttcacgtctgcaagaatcagagcaacgggcagtgtatagatcatgaagatggggtcggtgtcgttacagggaattggggatgtggtgcttatggtggagatcctgagctcaagtctcttcttcaatggcttgcggtttcacaggtcaaatctttatctcttctctccattaattgcttgtaattatcaaccaatggttgttgtctggctcacaacattacattcttttcaggcaagaagacctttcatgtcttactacacatttggatttgaagcactccaaaacctaaatcaggtttagtctcttatcactacatcaaattacaaaacagagcaaatgctctgttctgattaatatggttctttgggacaggtaacggaactagttgtatccaaaggatggactgtgggagatctatggaagaagctggtcaagtattcgaaccaaaggttaaaaatcaagaaaagaagagagcctaatgttggtttgtttgattggcttatttcgatcaaatctgcttaatattcaatctggtttcagacaatgaatatcatttgtattttggagtgaagtgtatatgaaataaaaggcagtgagaagaaaatcgtatccagtgcaaaaggaaaaatataacatttcattatttatcacatccattcacatttgtttaaggaagctagccaactatattgcatgaaaatccacacattataagataatactttgcactctttagatgaaagcaaacaatctaccaaaagattatgacgatcaaatagaaatctggagctggagctgaagttggaccagaagtaggagacggaggtggaaccagatatcctggcatggagacaaatggggaccttatgcttctccttccccttggaatgtcaacaaatatcctccgatcactctcttcgtccatcttcgcgtacactcggggatatttgtttgctttctccgcaagaatggatgacgatgagccaattggtagagaatgtaggactaatgataagagaggaagtttactacttatatagattttaattgcttcttactctttttcctaatcaattcctttgtctttattttttattttcacaaaaagtaatttaatttgtctttttcgtatattctgattggttgttcttttcttttattgctaaaatatattttcttttaacataattaatgattttcaattatgttttagtcaaacccgaaagaaaaaggaaacaaattttttatatttccattcatgctaaaaagaaatgaaagtgtcacgaggtccgacccaaaggtcatacatgctaagcagcttatggttacttattcattttatgctttgcttatcaccaattttgttttatgattatggtaccaaatttgtttttactaaatagttgttgttcataaatatctgatactattttttaattaatgtgtggttgacaaaaaaaataatagaaaaaggtcatgtaaccgttttttttattcggacaactatttttattggaccggccatgcgtataacttccctatttggcaagttttggtctaccattctatcccaaataacaaaacttgggttttatggtctggtctacaactcacaaatcacaagcatagacaaatccgatcatgtggcaaattcaagcttcagattgttgttgccacacaccaagttaatttgttgatttttaaatttaaatttgttttcttttcgcttcttaactatttctttttggttgtcttttttcggaactattacttaattattactactactacacatttggatttgaagcactccataacctaaatcaggttttgtttttcattcactacatgaaattataaaacagagaaatgttttgtatggatttatattgcgtttgggataggtcggaattggttatataggatggaagaagctgatcgaatattcgaactagaggttaagaagcaacatgaaaacaagaaaccctaaattttgtttgtttgatatattggcttacctcgattaaatctgcatgatagcattgattcaacacattaattttaagcaacaaatctcgaactggtttcagataattaagaaagaacataaactagtttatggatccttttattaactctcaaaggtcaaagcagttgaataaaaaatttaactctaaacaacttattccctacccaaaaaaaaactctaaacaacttattgataagacacgaaaagaattgtaaaacccctaaaattcaattttgattttcataattcttaagtttttttttttagttaaagagataattctaagacttgtaaatactaattttaataaaacttgattgacacggaaatagagctacaaagtccacaataaacagagattaatcacaaatcatagctattctgttcgttgacataaaagcgaaattaaatcgaaaaaactatataggacaaaacgaaaaaaaaaaaatgttgaaaatatcctgaaatctactgcaaataagaaagaaaaaaaaaaagaaaaaacttttattgctctttttttacctctcaacgcaattgaataaaattttaatcctgaacaactaaattcacaagaaacacgaaagaattgtaagaaccctatgtagaattaagactttgattatagatgcaagattataaaagactattcttttattccttcgaaaacttactcaaaacccaagttcttacaatctcttaatctctctctcaaccatctaaggttttccacaacttggaaactcatatatttagagactaacatatccaaaacttactaggattgtaattagataactccaaacttttttttttccgctagataactcctaacttatcctttagatatctcctaaagatttaatataatcctatttaaactaaatcacttatatctcaagttattaccaagcttagtccaagaccctaaaactcaaatttgattttaataattctaagttgcaaactcatgacacggtaatagagatatagtccgaatacacagagattggtcacacagctgagccggagtcggcagtggagctacaacaacaacaggatccagccggagccggtgacggaactggagctggaaccgagttggatccggtgctggagtcggggctggagcaggagccagtgctagatccagacaatccagcgtcgtcctgacggagaccattgagtctagttgcaacaaaagctggagctgaagttggagcaggagtaggaacagcggaagacaaagctgaagcttgacaatccagggtcttcctctctgtgactgagttcctcctgcttctctttctccttggaacatcatcaaatattctccggcatctctcacgatccattctccgcgtacacctagctgactctgacaaaagaaagtgttgtttgctccacaaggaacagataataagaaatagattgactagggtgaatgagagaggagattatatatgttttctgttttgtaaatagttttttttcttatttattctttctctcagtcctaatttttaggcttttatttcttttatttacaaaagtatatcagtgattctaaatgtaatatttaagataagttcactaccattagtccgttaccgacttaccgtcctgtgttattagcgaaaaaaaacaaaaaaaaacatttttgagttacaacaacaatatgttcatgacgtgtcattttcttatttgatagtttttagtctacgattctatcccaaataacaaaacagaggtttctatagggttttaagtgttttgtttttgctgctggggaagaagaagaagcagtggcaaatacagttctgttgctgggtttgttgattttttagtcaattctttttttttttcttggcgatttaattttggaattgaacttgaaaaatctcattgggttttcgattaatttaatcttgttcattttgtttcaggaggaatgattcttccattttcgacacagttcacttgccctgttcaggataatggattcagcccttcttcactactttcccattgcaaaagagatcgttttgaagttacttcgttgagatatgactcttttggttcggtgaagactgcctcctcctcggttagtttctgattacctaactctctaattttgattacttaagttgcgaattggctaatttgaaaccttttttgctctgaggtattgctagaagtggaatgttatgaggtcgaggagaaatgtgaaagcttttgggttagttgataaacttgggaagaaggtatggagaaagaaagaagaagatagtgacagtgaagatgaggaagatgaagtgaaagaagagacctttggcgggaaagaagcgagtctcgatgatccagtagagagacgggaatggaggaagacgataagagaggtgattgataagcatcctgatattgaagaagacgaagagattgatatggttgagaagaggaggaagatgcagaagcttcttgctgattacccacttgttgtgaatgaagaggatcctaattggcctgaagatgctgatggttgggggtttagtttcaatcagttttttaataagataacgattaagaatgaaaagaaggaagaagaggatgatgatgaagatagtgaaggagatgatagtgagaaggagattgtttggcaagatgataactatatacgcccgattaaagatctcacaacggcagaatgggaagaggcggtgttcaaagatattagtcctctcatggtccttgttcacaaccgctacaagaggttggtggtaacagtttgtcttacttatgcttgtcaaaatgctacacattttgttgattagtttttatgctgatcgctgactttggttgttattgggctgttttgtttatggattcaactcactttagtgtttagaagtttcaacctttattgtatctgtagataggtgtctctggctctctattcttgctgatgggatctttcaatcctgactattgtagttctagctgtgttgttgaaatttgatacgagtactggttaatttcaggcctaaggaaaacgaaaagttcagggaagaactagagaaggcgattcaagttatatggaactgtggacttccttcaccaagagtaagttgtggacatctctttaccatttctaaaaccattattgaatcttgctgtatgttgtggtctgtgcttaaacctcctgggtcattattacttccagtgtgttgctgttgatgctgtggttgagacagatttggtctctgctctgaaagtatctgtcttcccagagatcatcttcactaaagccgggaagatactataccgcgagaaaggtattgttcgaggaaacctgaaaccgttcagtacctgaatctctaacctttgttgctgtacttaaaatcaatttaacttatttttcaggcattagaacagcagatgagctttcaaaaatcatggctttcttctattatggagctgcaaaaccaccttgtttgaatggtgtcgtgaattcgcaagaacagattcctttagtcgatgtaagtgtgaattaagcataagcctttgtgatcttatgtaaagtagtttcttctctagtctgaagaaaatgtatgaactgaagaagtaatcaatcttttgaatgtgaaatatatgtttttcgaaattgctatttatagaacatgataaattttatgagtctcagaagcagaggcttcgcgtccgtaaacacttgatcaccatgtttctctctcttgcaacgtgctctcttctccctttctctctcgctctctctcaatctcccaccatctctcatcctcatttccccttcatggttggttttgttccgatttccaaatttcttcatttggcaaattcttttgatcttcttccatggattcggtaattattgaaccagatgagcgggaggcgttggcatcgcttgtccctgctcatcctcttcctccccgtaagacacattcctatgtcgagcaatgcgaacagaagccgcaccatccaatccgcaaatatagccttgatgagggctctagatccgtgacatcggattctgaagctgtttattttgattcctctgatggtgagttctctaccgaaggagtagccatcgtcgatggaagaaccagtggtgaaagaggcaacggggaggaatgtggttttgtcacgcctccatcgaaaccagcatcacagggcggtggaaatgacggcggcagggaggatgatatcgagtcccttccagaattcattggcgcaggaggtggccttgacgtattcaaggtgccggtgcgtgccgcggtgaatcccggacggcctccatgtctcgagctccgaccgcatccattaagagagacacagacgggaaagtttctgagaaacattgcttgcacagaaagtcagctatgggcgggacaagagaacggcgtgaggttctggaacttggaggaagcatacgaggtcggttgtggccttggcgggcaggtacggcgaggggatgaggatacagccccgtttcatgaatctgttccgacctcgcctgccttatgtttattggttgaccacggcaataggcttgtgtggaccggccacaaggatggcaaaattagggcctggaaaatgaatcagcccaatacgactactgcagatgattcaaagcctttcaaggaacgactctcatggcaagctcatcgtggtcctgtgaattatattgtcataagctcatatggttagtgttctatgatcccatagagttaatattttgatggttcgaatttggattctcaaatctgttgggtctcttcttgtttatgatgcaggtgatatgtggtcatgttctgatggcggtgtgataaagatatggactttggattctttagagaagtctcttgtgctaaaactggaggagaagcatatggccgcattgttagttgagaggtctggcattgacctgaggagccaagttactgtcaatggtacatgcagcatttcttcgtcagatgtcaagtttttgttagttgatacagtaaaagctaaagtttgggctgtgcaacacctctcattctcactttggtaggccctttttctctgaaaataatgacatacgttagtcttaattgttggaactttttcaaagagatctatcttgtgcagggatgctcaaaataaagagcttctgaaagtttttaatattgatggccaagtcgaaaatcgagtggacatgccaccaacacaaggtcaacaagttgaagacacgaaagcgaagttcttctccgcaccaaaaaaggaaaaatcacagggctttctgcaaagatcgcgccatgccattatgggagctgcaggagctgttcgtcgagctgccactagaagtgcaggagcttttgcagaagacactaggaaagtagaagctattgcgatagcggcagatggatcaatttggactggaagcatgaatggtgtaattgctcagtgggacggaaatggaagccgcttgcgggaggtgaatcatcatcagcaggctgttctgtgcttttgcacttttggtgatcgaatatatgtgggttattcaagtggttacattcaggtcttggatcttggtggaaagctaattgcaagctgggtttcacacaatgaacctgtgataaagctagcagcaggtggtggtttcatttttagcttagccactcatggtggtgtaagaggatggtatgtgacatccccaggacctcttgacagcttaatccgaacagaattgtctcaaaaggaaatggcatatgcccgacaagacagtgttaaaatcttgattggtacctggaatgttggtgaaggacgggcttcacgcggagcgcttgtgtcttggctgggttctgctgtttcagatgttggcattgtcgctattggcttgcaagaggtggatatgggggctggtttcctagccatgtccactgctaaggaaacggtaactccttttcttacagttatgtactcatgactatttttcttatatcaaaaccggttgaccagatcattaaccaagtacagcaggcaaaacctgtccagtactacctaggatcactagttatagagaaatactgtcatcagtagaatgtttaaaaatgttgcatgcgaattcatacgcttaatatcgggataatgctgtttgtcctacatattttaattgagctcatattggtgtttcggttgtaggtaggggttgaaggaagtgccgtggggcaatggtggcttgatgcaattggaaatgcactggatgagagaaatactttcgaacgtatgggttcaaggcagttggctggactgctaatatctctttggtaggcaaaaaagtcatttcagacgtgttacattttgtgtgttttcgagtgattgcaggtggaccagactaaagtagttttatttccttacatagcaccaaaaatctttcacctgtcttaagagtgtaaagttaaatcatatattccaaattaatcatcttttgtcacctcatatcttataactttctgctttagggtgaggaagagtattaggacacatgtcggagatcttgatgtcgcagcagttccatgtggatttggccgcgccatagggaacaaggtttgacctttacagctatatttcccttggttatgtctaatacaaaatcaggtagtatgatgtatgatccaatagtcaatgatagtggattttgatggctaacctcagattaggatgaatcttcattgttgatctaactgctcacatattaatgttcctactttgtcaaaaacagggaggtgtgggtttgagaatcagagtttatgaccggattatgtgctttgtgaactgtcacttggctgctcacttggaggcagttactcggagaaacgcggattttaatcacatatatcggtcaatggtcttctccaaaggacaaagtgtatatactgctgcagctggtatagtgccgtacctgtttttatcttgctcgcttggcttctccacgtacttattttggcttctttattcttctggcttgccatgggccctttctcttgcagctggtgcttcaacatctgctcaagcgctaaagaataaccctgtaagaagatttcatattagcatttacattttttgttcacaatctcggtctcaagctcctgctgtttgtcccttactaatgttattgttctttttccttgtcacctagaatacaaacaacagcactgaagaggagaagtctcatttagcatcagcagatctggttgcatttttcggtgacttcaattacaggttgtttggtattacctatgatgaagcgagggacttcatctcgcaccgatcttttgattggctcagagagaaagaccaacttaggcaagagatgaatgagggaaaagtgttccaaggaatgcgtgaggcattaatcaccttcccgccgacctacaaatttgaaaagaataaaccaggtcttggaggtaaaagatagatttgaaataaatttctcctggttgctctatcatgagtttgtgtctctgatttctcactaactaaacaagcttgtaggaagagaaagatttagacaaggtaattgatttctatgctgctcctatctccagggtatgattcaggggagaaaaagcgaatacccgcttggtgtgacagagttatatatagagacaaccaatcaatctcatatacggagtgcagtttaaagtgccctgtagtttcgtcgactataatgtaatgttccatccacgatcttctgatcttctctcttttctttccctttccctctttcccaccaccctcctatgcgttgtgtttgcaggtatgaagcttgcatggatgtgactgagagcgatcacaaacccgtgcggtgcaaacttcatgctaacatagctcacaccgataaatctgtgcgaagacaggagctagggaaaatagtcaagtcgaatgagaaactcagagccatgttcgaggaactaaaatcagttccagaaacatcagtgagcaccaacaacattcttctccatagtcaggacacgttcatctttacaatcagaaacacttcaaactcgagtagagccatcttcaacatcgtctgtaagggtcaaactctcgttagagaggatggagaggaacctgataatcattcaagaggcacatttggtctccctcgctggcttgaggttattattctccttttacgccactgaattgctgtttttgccatagacttagacatgatttaatgatttttattgtaaaacaaaaaactctatctaggtttctccaggagctgggattataaaaccagatgcttcactgcaggtgaaggttcatcatgaagactcccacaactcggaggagttcattgatggcatccaacaaaactcattgtctgaagaaagttctgacaaagaagtgaccctgatcataatcgttcagggaagctgctcgaccagaacaataagccactctatcaaagtccggcactgctcctccgcagccaaatcccttagtcttgttcattctaaaacaaccaccatgactaagaatctagagggttccactcgttaccagacagatgctaaccgcggtggaagcaccagacacagaaccgatgactccaccagacgtggttgatgatgattcctgttaacatctcaactatagctagatcgtaggagcagcagaactgtgaagccatcaaaagaaatgcatccagttatagtttcttcattttcattccttaattcatcggatattagaaaagggcaaattgctttgagactgttcttcagggtacagtgagcttttctctctctcgtaaggtagacattacacagataatgaactcattacagatctgttattctagtcgagaagctcaaatagcaatggcttacaggtacaaaatacaagtatatatatattggttattcttacattctgcgtaaatctctcagtatccaaattctctacaaatcagagggcatacattctcttattgtattcaccatttagaatatctgaatcagacggcatacgagacatagagaaagactgagacttgcttctttctttccttatgctcctcaatttagattcttccatcctatgcatgaccacacaatagcacatcgcaccaatcgtagtcaacataatcgtgccgccgataacagtcgcgcaaacagccaaccacatctcctctttgccaacaacaatataagagagagaaacaaaggcaatggatatgaacagacaagcacaccacatgagcttgttgattacaaacacaagcttctttttcgccttctgctcaatcacaacaactgaagtctgcaccacaacaacagctaaggatataaacagtgccaagctgtcaaagatgaagaagaccagaaacggtgctttgtttgctatatgagcttgtcctagcaactctcctttcgaccggtcctcttcgtactgaccgggtattgtgaagattgctgcgaaagccactgtggcaataagcactgccacaacagttgctgagtttatagcgttgtttagaccactaatgtgtagcttcttgagtctttttgctatcttctggactcttacacctgtttgtctggattgctgaagctgagattgtacttcatgtttgatgtcgctgactgtttgcttcagttgcttagctgggttctgaggctttccgagatctttagctgtagcagctcctgcttccttcagaactgacacaagctctgcgtttcctatcttctcagagacatcgagtggcgtatctccagctttgtttattgggttgaggtttatgccttcaaaagataccaaacaccgtactatctgcagagaagtcaattaacagtttacataagaactaacattaactggacactcaagaaaaggatcattccataatgaataatcccttttattacacttctctaacaccgagttttgatatatgagaaaagtaaagagccattaccttaatacgccccttgtttgtggcaatgtgcaatggtgtatttcctttattatcctcaacgctcaaaacagcaacatcaggtttcaccaactcaacaacaatcccatcattttgaccttttacagccatgtgaagagcagtttgcccttttttatcggttctaaacccaatgcttggatccttacctatcagagatttaacaacttccacatgacccatccttgctgcagagtgaagcgcagttttaccgttgttcttagcaatcttagccaaattagagtctgtctccaaaagaagattcaccacatcaatatgtccctgtgttgcagcagtgtgtaacgcagttgtacacgataaatccgttgtcattgccaaattagggaatgtctccaacagtatcttcaacacctctacaaaagaagacgagccaagtaagagaacaatccattgagaatggagaaaatatgaagaaagtataaatctttataccgagatggccttgtttggcggcgacatgaaatggatcaaacccgtttctagcagcgatggaagcagtttcaaggtccatatgcttcaacatctcctcaacaacaattgaatgcccattctctgctgcagtataaagaggagtctctccttcaagattttgctttgacaacaactctttcaactcatcaccacaacctcgaatcagttctttaaccttacttaagttcccggttctcgcagcgatatgaagagaagagtctcctcttttccctggtgattcattcttcttcctcctctcacctataaaactcaattgcctctccatcaccacacggaagctcttctgcttctccaaaaacccaccacggaaactcttctgcctctccattgttgctctaccaaaactcggtagcttctccataactccacgtttatgattctcaacgttgacacctcgaaaactctgttgcttctccattgatcttccgagtctgctttgctgatagttctctacattcacaccttggaaactcacttgtttctctaaagctctcgcctttctcggttgattctccaccacacatcggaaactctgttgtttctccattgattttgtctgattctcttgtgtttggtttattattataccattaaagctctgttgcttctctcccacaggactgttgttctgcttctcctccattatagtcatatcctattactccaatttatcgtcgttatcaactaaaatacctaaacccagattatctatatattatccccaaatctaacaaaaacactaatctctaatacacaaaccttgagaaaacaaaagagataagcttttgttgattatcacctcgaagaatccatgtattgcaagcaacaagaagaaaaaaaaacaactttacgggaaatgaattggagagtagatgtcaaatcgtcccaagctgtgaagaaacttagaatcgattaagatcggagaagaagaagaagctgattcagtacctcaacaagaccaagagaaacaccaaattgataccaacaaaaaaaagagaaacaccaaaagagctcgaatttcaacaagggtttgaaaaagcttgagcctttgtgtgctctctcaccacgtgtgtgaagttttgttgttgttaagccgaagatgaagaagaagctgcgaaaagagagaagagagagagaatgtcagaagaagaagaacatcagcatcaccatcagttgggtttgaagaatttcagcagccacaaactcttgttttatttttgttagtgcctcttttttattaataacacgcttttatgcaagcatcactcttaagcgataataaagtttttactttttactttttagtattagtttctctttttgtgtcgacagtggaaagctttttctctatggtgtgttagatatttcagtttgagtctaataagataaaagaaattgaataattgatggaggtctctaatgctcttttcattgactaatctatggatggtgccatgtcacctaatcggagttaaaagtctaaacaaaggtaagacgatacaactagtcgtttttacttacttgctctagttaaaagtccaagtcagtatcatttggttagggttttgtttggttgatcactttgttagttaactaacgaattctcctttttgtgtagtgttgtaatttaatgtcttgtacacaaaactaaggacgactaaaaagaacttgcatttcttaacttattcacatttctaattaaatgattaaacaatttgtttgaccggattttcttagcttagtaatatgatcatattacaaaatacggaaaagtgttgtaaaaaattctcaaaagttaactctagctttttatagctggagagacaaaattctacactaactacaaaatacagttatatcttagtacaaaattacggttataaactgtggttaaattgagaactgtcttagtacaaaataaattaagaaacaaggagattacaaaattatgattcaatgaataatttatatcttccgccgataaagcataaataaattgatcgatccattcatagtgcccgaaaattttgtagtcactacagacaaattaaaataaacgagtaaagcataaaaagcacatggtcggctctataattgcaattctcaaactttttcttttacatatgcatatcgaagagaaacacaactttttctttccaaaagtgtatttttccaaatctaagtttccccgattctaaatacagaataatcatgaaaatggttagattttttgaaacttgaaagtatattcttagagaagtgacatttattgaaaaggttaagagatgatgatatgagtcgtatggatcttatttggactcacaattattgaattacttttgtcaggagtaatcgttattgaagttaccaatgtaagaatcgaatttgtagaagaggagtcatttttaggtacacgtccgggtcagtcaacgcttacttagtttgacttttgactctctagactataacatttacaaagtccatttgtgtttcctcttttagccatctcataataataacttgggaaatattgggaaaataagacgaacgaatattaataatcctaacaacttttcttatctcaaaaagaaaagaatcgaaatgaagccaaaatcagctaattgtttcataaacaaagtcacaaacatatatctacgcagtctctctgtctgtctttgagttggttcatagactgtgtaatgaaacttttaccttcaaaagtttctgatgttcgatggatgcactctgcaacggtttagcctgttaaaggaaaggagtatccacgaaggtacttggagtccactcccgattcacgagccaatgccacacgaccggttcttgcaacctgtgattgattgttcataataagcgtcaacacgatgcataatctgaaagtagtcatggcttgtcaagcttattcttgttctacacacaaccagaagaagattcatgtaactaggtccagctttggttattgattttaccagagagttagatttcactactctgtttctaagtcgtaaagactacaactaaattttgggactttatccgaacaattggagtatcattataagaaattaagaattcacggggttatgcattcactaagagatgaaagtagattgcgaaacaaacctcacatataccatagggctccaataacctttgcagtgcaaccatcttgtctagatccccagtaagctatacccacagccaacaaatttcagcacaaaatccaaaacacaaaagcaaaaaaatagagattaagatggaaaatccaagtcagcttcatatatttttttcaaacggaactctgattatgtcaaacaagttgaagacctatggaaagacgtgaaactttgaagatctccaattgaaaggatttctcatctgagatgcaataacagctacataaaaatcccatttatgagaaatgtattttacctgcaaagtaattgtgtgatcagatacgtcaacagctttagccctgaaaatactagcaatgtccaggacatctcttctagcagcagcgttcacggcaatcttaatcagcatcagttctctttcagaaaatggcaaatgagtaagatcatggacctgcagaaaatcctcacaaagttaataacagcttggaaagttgcggcaaatcatgttcagaattattttcatcaagcctgtacagtttgactttctggaacaagaggtctcattcgagtaaacagacaagaccaggaaatgatataggaaagtccagaaagatttagcagaaactcttcctctaatctacgttttaaaaaaagccaaaaggtctaagacagcaaaggaatgatagggccatcaagacattcaaactgttaaatatataagaaagacagtagcttttggtaatcccacctcatgcacatctacgagtttgtaaagttgctgcaccaatttgctgaccgattcatctgttgcaggtataactgttgtaatgcgtgaaatgcccttggtttcagcatgtcctacggccaagctctaaaagaaaggagatctttcagtgtgtcagtaaacctaagcacactgtgtgtgcgtgtatgagagagataaggactatgcctggatattgtatccccttcgagcgaaaacaccagtcacaatattaagaactcctggaatatcatttacaagcaatgatagagtatgcgaccgtagtccactcgtctgaaagatcaaaaaagaataactgtgataaataaaacgaaatagcttaaagaaaaccccaactctttcaatgtctgctttgtaagtaaatacatacagtctccaaatctaacactcaattgatttatcatttatgtaactatattaacagaattgattatgccagacggcttgaatggaaaaacaagtgtaactcgtgtaatgcaaaccacaatctgaatttttcatattgctttttagcaaattcatggcacgaagttagatatatagcaaagaactctcttacatcttcgtcagtgagaagtccccagtgagcgtcgagaatacgatgtaccttggggtcaaaaaatggctcaacgggataaacatctccctacatttaaaaagataagataacttttaaaaattagcaaactcggaaatccttcagtgcagccagggagaaaaacaaaaaagggcatgcttcaaatgttgattccaggcagccaccacatagagggaaaaaaacacaggcatctatagttctgtttaactttatcaaatagccaaacctactataatttatgcaaccaaattttttgaaaggaaagtgaggaacttcaagctgaagttaaacaatctaaggagcagagaagcacacacccctgctgatgtttccttttgagggacaatggctccttttttgctacttcgaagaacactaacaggcgcttgctccttgagatctggataggatgctgctgaaaatcgccaaaatggagcagttgcacccatcttttcccttctcagtgctatctgttatccaaaaatgtcattccattttccctaaattagtgaaagtccctgagatctatgcctttgtgtccactcaaagatgtaactactacatacatacattagatagcacaaactagatgatattcaaaagccataaaatctagtaattccaaacatacactacctttcctgtccttacaatctctctgatctgaaactttttcaaatttctttctacagcaatcatttttccaggatctccagttacctgcaaaatagcttaaaaatgattactaaagagctaaaataggtaaatcagagacacccttttttttactccactttctcataatcaaggtaaaaagaacaatatatttaaggttatgcttctctaactttcaaaagtgaacactgagcattcccacagaaatttgcacaggcaatacaactcagaatacagattataagcatagggtaatcaaaggtagcacactgttgaataactttctcgttatattaaattcaagaagttgcaccaaaagtttcaaataaactttaatacacatcctataatagagtcctgcatgtggatcatcatcagtttcaaaaggcaacgaaaatccaactaatagatataaaagttaaaatgataccctccataatatttctgatgtcttccaacgattagtaagatgttcaaacagaagtctgaaacccacaggctacagtgcgaaacaaatatcaagaccaacacaaatcataataagtagatgtacctcgatagtcaatgcatgttccgctatatctacaactcttgctctgaatgtgtcaactagccacatgatctgtgaattcattaaaacagaagcttaatcaaatttagagagaaaactaacaccacctctgccctaaatcagaagcaaccagcaagtacagtaaactctaatttcccataggcaaggaatagtacctctgccctggattctggatgtgcattcacttttacaagcatcagctcacgctccacttgcggctcacttgagatatcttcaacctaattcatgtccaagtcaatgaagagaatggaaaaggaaatcgcaaatgtaatcttcaaataatgaataagcaaattggctgatgcgtaaagttggtgcgaatgaaactatagtcatgcagaaactaataagtgcgatctaacaaaagaacaacctttagaacattaacgagcttctggagttgctcgatgacctgctgaagtaccctttcagttccacagacaactatggtgaatagagccttgtctctgttcagaccaacagcaagactctcaatattgtatcctctccttgcaaacactcctgcaatcctattaatcattccgctttcgtctccaacaaatactgaaattgtgtgcttcctcaccctgattttaatgcacaaagaatcaatcaaagcaaaggccaaaaggaaacgactttaagcaaatattattcacagtacttcgattttggagtcgcagatgaagcttcggagaaagacgcatcagagatcttcccatcgacgcttctaacgaatccttccattctcttacccatttcatcgccacggtgcgaagatataccggagagatatgaaatcttcgccgggaacgatacacgcgtcgaggatacaagagcaggagaagaatcggaacatgccgatctcaagcagcgaatagatggtgaagaacttacagaaatggccgccattgacgagacgaagccgaaggttttttgctactgaagaagactgacgacgacgaaacggcaagtgaaaaagaacgtatatatgttggttagaccggtcaaaccgtccggtccggttcggttgttgacgaccttagaaatcaatggctttaagaaaagcccaaaaggcttcgagtagataagaccaacacgtcagctccacgtataacaaccttttcgagtcaactattttcctaattttgctaaaaagtatcttgggttcgtcggaactaattgtaattatgagaagtttagggtaaaattcataatttaggaaaagaaaatgattttaaatccggtaaagccaccgaaaaaagtggacaatcaagaagagtccatatttacgcgggactcgccaaataatgattgaaaggaaaagtcaaatcaaagtcaatcggaaacagacgtcgccaataatatcttcacccgtcaaattaaaattaattatttctcgataagcaacgcgctagagacggatctcacataatcaccagatcaattttctcgagaaaaagaaaatgtgattatccattcgattttttcgcagaagaagacgaaagagagaagaagagaaagagatttgaaatcatggcgaatgtagtgggacagctaaaacgaggaatctcgagacaattctcaactggatcgcttcgtcgtacgcttagtcgtcaattcacgcgtcaagcttcacatgatcctcgccggaacaatatgcgatttagttttggtcgacaatcgtctttagatccgattcgtcggagtcctgatggttctaacggtccgcagcttgctgtaccggataatctcgacgctactatgcagcttctatttgtggcttgtagaggtgatgttgaaggtgttcaggatctgcttgatgaaggtattgatgttaatagtatcgatcttgatggtcgtacggctcttcatatcgctgcttgtgaaggtcatgtcgatgttgtcaagcttcttcttactaggaaggctaatattgatgctcgtgatcgttggggaagcacggtaatgtgataaatttctattgttgtctcttattggttaggttttgtgcttttggttttgaaattatgtttgtgttgtgtggataggcagctgctgatgctaagtattatggtaacatggatgttttcaacattttgaaagcccgtggagctaaagttccggtatgttgctgcatttttcattgattcaagctctgttcttttcatatcttaatatgtttatagttacattttcttcttggttttagaaaaccaaaaggacacccatggttgtggcgaatcctcgtgaagttcctgagtacgagttaaatccgcaggaacttcaagttcggaaagctgatggtatctcaaaggcaagatctctctttgctttactttcctgtaataatgtcttagtttccatttatagatttttaacaagatactacatcacttttccacttgccagggaatatatcaagtggctaaatggaatgggactaaggtttctgtaaagatacttgataaggatctctacaaggattctgacactatgtaagattactcttctcttcagtgagtaatatgtctatgttagctaacaggtcaagaaggagtttgaatttcttcttgagtgaagctatagatcgttgaaatcatctttgttatgttcatagtgatgatgatatgagctgtaacattattcaatcatagttcttatagaatcttctatgttggaattgtgcatttccagtaatattttctggaatccacttcattccctctgtgttaatccttgtttttcttttcatatattacgtttgttctgcaatcttctcatctgacttttattatgtacccacagaaatgccttcaaacacgaacttactttattcgagaaggtacgtcatcctaatgttgtgcaatttgttggagctgttactcaaaatgtccccatgatgattgtgtccgagtatcatcctaaagtaagcttctccctctttttacaccttaaaagatttttccctcattaagcaatatttggatggtaggaactaatgttgtccacttggtggtaacttgcagggggaccttgggagctatcttcaaaaaaaaggtcgtctttctccagccaaagttctaagatttgccctcgatatagccaggcatgtgacttttttggcaagattgtattcaacttacaactacattttttttaataatcttttgaacgaatcatttggctcttctcaggggaatgaattatcttcacgagtgtaaaccagaaccagtaatccactgtgatctaaaacccaagtaagataactaaataaagaagcatttgcacgttaagtttttcgagaacatatatttggaccctcgttatctaatttttgcaacttcttgtaaggtgccagaaatattatgctcgatagtggaggacatctgaaggtggcgggatttggtttgataagttttgcaaagttatcatctgataaatcaaaaatccttaatcacggggcccatatagatccttcaagtaagtcctaaatgcttatttcctcctgagaaactttgatacaagtattaagtatagaaactgtttctactattgatatactcataagttataagaatggtccatttccatgaggcaatagtttaaacagatgattttttttgttgtttgcagattactgtatggcacctgaggtttacaaagatgaaatatttgacaggagtgtggattcttactcttttggtgtcgtattatatgaggtagtaccttatggattcatacgttttggtgtcatcttatatccggtacctattagttacgttaatggtcaaacattgtgctcctcggcatttcttgatggctgtatctagtctggttttattccactcactgttctatatgctctctaaaagtacttcattctgtttctcaaccattctagctgattatgtttttcctagcattgactgattgaggccaataagcttctctagcaaatctcatgcatcaattctctgatgagtttatcttaaaaatttcagatgattgaaggagtacaacctttccatcctaaacccccagaagaggcagtgaagctaatgtgtttagaaggaagaagaccttcgtttaaagccaagtccaaaagttgtccccaagagatgagagagtaagtgtactaagctttatcaactttaaaacagaacttgttttacactttaagttacagtaacatcatttgcttggtccttgatcctttacccaacctctttgagcttatttggttcaattgttatttaaacagattgattgaggaatgctgggatacggaaacttttgttagaccaacattttctgagatcatagttcgattggacaagatctttgtacactgctcaaaacagggatggtggaaagatacattcaagttcccttggtaaaaaaactttctcttaacaactctttatcatttatgtttttgcatttctacttccaccttagttaagccgacttcttctaagatcgtgatttttcttatccataacggactagagccaagctctttatatatatcatgattttttctctcacccaaatgtatgatttctcaggaaatagtacataagaacgtgagaggtttactcaggaacacgagaaactccacaattcaagagctctcttctcatgtttacaataaactcgatacaaagaatacaaaaagaaacggccctctccgatttgtcattgtcttatcgtgtaacagtgtacaatgtaaaccccaaaaagtactttcatcgagctatatagacttctctactgcacagaactgagcattttgagatacaatgtatcatatttatataagtatcaagaaagctctttattcttgttatgcttcaaattcaaacatctccgttttttaatacagagttcatatatggatttgttcgcaggggacaaccaatggaaccaacaggataattcaaatttagatgacaaagaagccgttattaggtaatcaactaacaaactgatgacatctcagtttcaaattgttaagtcaaaagagcaacaaactcatcaatcttcttgtcggaactacctccttcagagatagcttcgcgagccaacaccttaagcttctcaacattcttccttatctctttccctctctctccttccatgacctcaacaatgcatctcgcaatctcttctttactcgaaagcccttctccatcggtcctcactctaaccccaatcttccacacatcctctataaacttagcatttgtgggctgatcagtccactgaggcacgcccaccattggaacccctaagcatagtgcctccaatgtcgagttccatccacagtgtgacacgaaacacccgattgattcatgtgctaaaacctctagctgaggaacccacttagccacaagtccagagtctttctcctctgcctcttcgataaaaccagagggtagtttgcttctctcggattctctaacagaccacaagaagtgatatccggtttggctaatcgccattgcaatttccttcatctgtttttcgctcaaagccaccaatgtcccaaacgccacgtaaaccaccgacttcgccggcctgtttcccaaccacttcaaaacagactcgtctggctctgtcttggagttctcgagttcgtaatctttgtcttctggcaaccggttatccaagaacttcgatggaaccaccggtccaatgttcttcaccggccattgatcattcatccatttcactacctgtgaaagaaaaaacacgttccacaaaaactttccaccttcgaaaactcaaaataatgaccaaaaccaatctaaataataacgttacctttggttcaagttgatcaaaagtgttgcagagaatgcaatcagcttgcaataaattagagaattgcctaaccacaaactcgtgtagaagagggtacgaccctttttcgcaggcgaacgaaggcagatcatcttggcttaacaatgggaaaccaggaaacgatgcaagtgttgggttctcgtgtctatcaacgggaacatcgtaggtgccttcgttgatatggtagtaaacaagactagccaaccatggttgagtgaaatatgccactacgtatagatccaagtccttggctatgtccaatgcaaagggcataaatggatcatagatcagagcttttggaggattgtccgacaacttcgcactgcatatacaaggggttatataacagtagagattgataacgtttttgcatataaattatacttatcctaaaaacgctacgaaacttgctttgatagttttaacactaattaagcttatttcttacatgggcattaatgcattatataaactattttaaattcataaaaaaaaaaaggcttatgaatgttgtaaatggtaaaatctagctggattactgtgtataaacatgaaaagtggttgataatcactcaaaatatacattaaaagagacagaacacaaaacgtttcgtaattgacaaaaatagaaattctatgtcactcggaagtccaggatatagatttttgactaaaattgttctctcatcaaattccaaagtaaaattacctctaaaataactaaggagatatgtcatattggaaattcatgtattgtacctagagatgaaatcggtcaggcttcgagaagtagagttgtggaaacggtcaagatctacgaacttggcgtgagggtgttcatgtggaaagaaaccgtcgtggatggtgtggacggtgatggagtagtcgtcggaggtgtaaggttcacggtggtctttggaggcgatgatgagtgtgctggtgatgccctttttggataagcgtttagcgagttggatcattgggttaatgtggccttgtaatggatatggaaaaaacagtacgtgacccttctttgcttcactcatttttttggtaaaattgttcgaaccaaaggaacaataagttgttgatattgtgtctcctatgtaagttaagtgaatatagtgttatatacatgtctcattatttacgatgttggataaaagttattataatttttagaatacttgtcaattcttctttttcgtcttcttcttctcttcttctgttaatttggttttaaatttgaaggaatgattcattataaattgatgcttcctttttgtgaataagtttgtatgcaatgcgtgagagtatttcaggattgatttctatgaaatgtgtagagagcaatctatgacgattaagacattgtgatggtaaaaaaaaaaagattcttactatgccatataataaacgtggcgggtagatgaagccatgaagggaggagattaggtgggtgggtccgataaaaattttgatttcattatgttatctttctttttttgtggatcatactttttcatgttattttagaatttgttggacttcagaaagagttgtatagatgagctcaacgaaaatagaattatagatgcttgagttctcacaattcatgtaatttatttttaatctttgtcatgttaggagaggtttcatccgatgtttgaatggatattacattagctcttaatctagagaagttttcagacaataaatacaaattatggtcaccaaaattgcactatgaaatataaagcaaccaagcagcaaagtcgcaaatccttaattgtaaataaataaaactttgaggtctaaggttaaaaaaaaaggcataaaaaaatctacagtccttcgcagcaaacacataaaccatagaaaatattgaagttactaaaactctaaattaaagtttttattttccttgtcttggaccttttggtaaaagattcaggttcttctattgactggctctcattatatgccacgtcaacaagaccgttctccaaagctttcaccagattttcgaagtaggttttagttgctttagtcaaatcaattaatttcgctcggagctcaccgaaattttttgatgggtcttcaattttcccgataaactgtttcaactcctcctctgcacaatgatgaagtctctccaaaccattttctgcctcagctgaacaacaagacaacgaaaaagttctgctacaattaatggaaaaattaagattacacacaaattaagtgtttccgtaccaaaaactgaccttgcaaatactcgcttgttgcgctcttgactaagtatgtagtatccatatgcataggtccatttcaagaccctcctacactcgatgatctgtaacagtaaaatcaagtacatgtcaacaagaattaatataatgtcgtaactaacttagagtctaattggtagttctcatgcataatggtggaatgagaatataattaatgccgtaactaacttagagtctaattggtagttctcatgcataatggtggaatggtttcaccatttcggaaagttaaccgtcattaagatgatttttcaatttaataaagcttttctagttttttctactacagattatgttccgctgttacaatgtaagtaacaaaatctaacttagaatctcattggtggctagcataatggtgggatgatttttgccagtttgaaaattatacacactttttttgtaatctatctattcatcagttcagatcaatgataagttactcataaaatcgtcttcaagaaagcttgtcgtttattatatatctactatggtagtaattccattatgttccgtcgtttccacaaacattttcaatggtcttgtaaatgttacttttactaacctgaagccatgcatctacggtgaaactgagctgagtttctggtgtgctctgaatgtcactaagctgcttaagctccaccgattgccatttctccaaatcactcatagctttaagcctcgaggattgattgaatgcccatctttcataaaaatgcgtgtatctatcgatcgcatctttagccctttttctcttagtttcatcctcattgtctgctttaaacgcgttgcaagccttgtgatcgctcaatggttgaaggcatgcccaacaaaaataatgtctacatggagctgagcatgacatatggttacatccagtgttcttctcaataggacgcttgcatttaggacaaggctttgtcttagcaagtatccaattcatgttctccgactcatccttgttctttagtaaccactttgacactgtttcacaatccacaggagagtgagcgtcttcacagcaattccagcaaaacttatacgaacacaaacaagaaacatcgtaactactacttccatttacaccaaattcaaccgcgtattcgcatcccggtgatggacaccatttcatcttcttcccgtcttcgacataagacctaagaaaatatctataatacttgtccttatctttcttctcagtaacctcatcgatcatgtcttgaccaacaacagcgtaacaagaaggttcgggacatttaacccttaaacatcccggaccgtcttcgattttcgtagtgatgtaaccagtccagcaggtcttgcaataaggatgaccacaagaaaccctagcaatttcctttcgagtgtatgattcaaagcaaattccacattgaatatccacttctgtaccattaacatcaacgacaggctcctttaatataccaacggttttacggattctctcttcgtccgtaaaccattcatcttcgagtttactaacacaccaatgatagtgaagaagcagaacaatcgattccacttggcttacagagagaaccgtcgaaacttgttcgatatcgtctctttgaagcttaagaatgtcttcttccttaacaacaacgtaacttttctcagatcgactaattgtgtcgtccacagggttgtagtcatcggatacgttaccaccatcgctgtacaaatcctcctctcctgattcgatatcgatgatgtcgttaccaccatcgctatacaaatcttcttctcctgattcgatatcgatgatgtcacgatctgaagaactcatgaccgtctgaaaaaaaaaaaaccttaaacgactttgagatttaaaggaggcaaatgaagccaagtctcattggtaaactagggctttgctctaacaagatctcgatcgttattttatttatacttgtagaagctctcttctaatcatcgctcagatattagggttatcattaggatatccttggtgctaaaacaacataagagaggataactcaaaattatagccaataagcattttccacgtgtttccatctcggaacaccggaacgttcttcagctagtgttaagtataacaattacgaaaattaaagtttctctgggccccacatgttttatttgtatcatatctatttcacattttcgggtgtaaaaaaattcatcaaattttgtttctcagttttctcttggattttaggccaaatatataatattggttctaaagtttgttgagggaattttttttttcggttgaagatttatatatccaaaaataacttttcaaaaaaaacaaatccaaatatatatatatatatatagaactaacatcaaatgttgttaatattagtttttaaattaaaaatagtcattaaactagctgaagaacattaaactatccttaatattacatcaaatgctattagttttaaaataaaaaataaaatagtacattaaggataaagaaataatcattataagtcatatttactactatctttataacaaacaaaatctacatttaatgtattttctcattattttctttatttgaaatatttatatttatttttttatatagaagtaaatcttcccaacttaccaaaaaaaaagtaaatcttcaaaaatttctttctaattttttcaaaaatatttcccatattttaaataaataattaacagtttctaagagcatgtgcaatgtggagttctaacaatggttatggataataaaaaaaaaaaaaaaatagaaagtaagagagagagagatgagcatgggatttcaaatgagaacctcttgagagactcttttacccatgtcgacatataattggtttgattctttttttattacttcaaatttaacaaaaaaaaaaaaatatgtgtcttaaaataatataatttgagagactttgcaaacctcttccattgcatatgctctaatcgagatctgcggtcgaacaagtaaacttgactttagcgttggattagttgttatacttaagaaaaaatatttaacactatttggattagttgtgttcatcgtgtttagaaacattacattaacaaaaaaaattataggttttaaaaccaaatctaaggaattgacaaatacaaaagcatgaacatttgatcccgctgcatatatttcttatacggaaccaagttcaatgttttttccttttttaaattgtaaatttttccatgggtatagtttgccgccaagtcgtgacgacgtgggtggcctctaatatcggtttcaaggattgtgaagtacatgtctatccattgcaaattgtactaggcgagagcaagtaatcaaaattcaaaagtcaagtatcaaaaaaaaaatccaaattgctttgataaaaagaaaaaaaaaatatccaaattgctagcaaaacgaagggattaaattgaggctgagagagatctcaatcgtagtagcagccacttaaaagagcttcatcatatagcctttgtgtttcgagaaaatcgtcttcgtaatcttgatattcttcgtatttttcttgtgttgatttggtctcattatctggggggaattcattatgtgtcacatcaaccagaccattctccaaagctttcaccagattttcgaagtaggttttggttactgtagtcaaaccagttaatttcatccggaaagcattgaaagtatcggatggatcttcacttttaatgaaaaattgtttcaactcattctctgcacaatgatgaagcctctccaaacctgattcagcctcccctgacaacaaaaatttaattagctacaatggacaaattatgatcacaacgtacatatttaagtgtttccttaacgaaaactaaccttgcaaatactcaaaaaatttccgcttggggagatcttgaaggtagtatccatatgcatatgtccatttcaagactctcctacattcgatgatctaccacagtaaaatcaatcacatgtcaataaatgttcaacaacaatgttctaatttatcaaacgtcaaaattggaaattcattggttattcgcatcatggtgatttaccgatgaaactctaagttcgacttttgataaattacaactttagttgaatcatgaaatcgtttttactaatttctacggtgcttgctatatatatacagtttcgtaatgttagtataatcaaagagttatttaaatacttttactgacctgaagccatgcatctacggtgaattgaagctgagtttcagacgtgcactgattgtcactaagctccttaagctgcaccgattgcaacttctccagatctctcatagcctttagcctcgacgattgattttctgcccatcttacataataatgcgtgtatcttttgatttcactctgaagcaatgctctcttactttctgcctgctccacaacaaacctattgcaagcaccgctgtgacgacgatatgctttaagacaaatccaacaaaactcatgtccacacggagctgaacatgtcatatggttacatccatcgttcttctcgataggacgcttgcattcaggacaaggctttgaattcgcaagcatccaattcttgttctccgactcatcctggttcttgaatatccattttgaaaccgtgtcacaatccacaggactgtgagcatcttcactgcaattccagcaaaacctatacgaacacaaacaagaaacatcgtaactactactttcacttccaccgaattcaaccgcgtatccgcatcccggtgatggacaccatttaatcttcttcccatcttctacataagacctaagaatatatctagaatacttctcgttaacttttgtctcagtaacatcctcgatcatatctttaccaacagcagcggaacaagaaggctcaggacatttaacccttaaacatcccggaccgtcttcgatttttgtagtgatgtaaccagcccagcaagtcttgcaataaggatgaccacaagaaacccttgcaatttcctctcgagtgtatgattcaaagcaaattccacattggatattcacttttctacattttttgtctttttctccaccattgaagtcaacgacaggctccttcaataaaccaacggctttacggattctttcttcgtccgtaaaccattcgtcttcgactttactaacacaccagttatagtgaagaagcagaacaatcacttccacttggcttagagaaagaatcgatgaaactcgttcgatatcgtctctttgaagcttgagaatgtcttcttccttgagaatcacgtaacttttctccgatggaataattgtgtctaccacatcgttgtagtcatcggattcgttaccaccaccatagctgtaattctcctcccctgatttgttatcaatcatgtcatcatctgaaaagtccattaccggcggctgaagaaaccctaaaacgaatttgaggttaatttaggaggaaggagacgaaacaaactgctagaaaatctagggttttgctatagaataagtcctctcttgtaatcacgatccttgtataggctactactagcaggccccagctccgctttattaggagatcttaaaaggaataaatagttttgaacttttactttttaatttgttaaaagataaactcaaatcttttgttgaaacttgaaagaccaattaattaaaacttcttttagacgttaaaaacggagtataaaatatgaaagatttggtacaaaaatctttagatttgatttcaaaacgatagatttttattagtactttgttttggtctagaatttatactccctttgtatcaattaaagtgatgttttcaagaatttgttttttgtataattttaagtgatgttttcaattttctatgcaaaaattatgtagatatattttttttttaccaattatatttaagtgcatgttttcttattggttgaaattattttatttaatggtgttttggtgtaaaagaggtatattaaatgaaaattatgtgttttcttactttatgtgtagaaaccttaaacatcaattaaaatgatacaaagggagtattaaatgggaaaataatgatactataaattattttgtctatttagatactgaaatagttacagatatgtaaaaaaacatatagacgaaaataggttaggaagaaaaatgaaaggtaaaagaaggagatggaagaagaaataaatgtatgcaaagtgataaaagttcaaaagatacacacctttggtggcaagaaaactcagatttctatgagtcccctaagattagtctgtacagtatttcgatttaccattcatcctggttctgtttttttttttgtcttaaaggattgtgaagtacatacatgtctatatatctattgcaatggctctttctaaaatttcggagaagatgatagttgttttcaccaaaattgtacttggaaattaaagaacaagtaatcaaaattcaaaagtcaaagaagcattgtgaaattctttctatagttaaaaataatcatagcaagttttttttagtaaaacctatcaaaaactatccaaattgctaataacaaagggattaaactaagggagagagatctcagaagaagcagccttcacttatataagcatcatatagcttttgtgtttcgagaaaatcagcagattcttcacttgatttggtcacatcagcaagaccattctccaaagctttcaccagattatcgaaataggttttagttactttagtcaaaccagttaatttcatccggaatgcattgaaagtatcggatggatcttcacttttaatgaaaaattgtttcaactcattctctgcacaatgatgaagcctctccaaacctgtttcagcctcccctgacaacaaaaatttaattagctacaatggacaaattatgatcacaacgtacatatttaaatgtttccttaacgaaaactaaccttgcaaatactcaaacaatggtcgcttggcgagattatcaaggtagtatccatatgcatatgtccatttcaagactctcctacattcgatgatctgcaacagtaaaatcaatcacatgtccgtacttgttcaacaacgaacagtgttgtaatttatcaaattcataatggtggaatgatttcgtcattccaaatattatactaatcacactttttagtgatccattcatagttcaagattaatatataagtataatcatgaaatcgttttttcaaatttctacgatggtcattcctacattctctgtgtaacattgcacatacaattctttttttaatatacagtttcgtaatgttactaacctgaagccatgcatctacaatgaattggagatcaatttttggtttgcactgattgtcactaagctgctttagctgcaccgattggaatttctccagatcactcatagccttaagcctcgacgattgattttctacccatcttacataataatgcgtgtatcttttgatttcactctgaagcaatgttctcttatcgtgatcagcatcttcaacataattgttgcaagcatagtgatcactatatgatttaccacaaatccaacaaaaacgatggccacacgacgctgagcatgtcatatggttacatccatggctcttctcgataggacgtttgcatttaggacatggcttcgaattcgctagtatccaattcttgttctccgactcatcttggttcttgaatatccattttgacactgtttcacaatccacaggactgtgagcatcttcactgcaattccagcaaaacctatacgaacacaaacaagcaacatcgtaaccactactttcaccaaattcaaccgcgcattcgcatcccggtgatggacaccatttcatcttcttcccgtcttcgacataagacctaagaaaatatctataatacttgtccttatctttcttctcagtaacctcatcgatcatgtcttgaccaacaacagcgtaacaagaaggttcgggacatttaacccttaaacatcccggaccgtcttcgattttcgtagtgatgtaaccagtccagcaggtcttgcaataaggatgaccacaagaaacactagcaatttcctttcgagtgtatgattcaaagcaaattccacattgaatatccacttctgtaccattaacatcaacgacaggctcctttaatataccaacggttttacggattctctcttcgtccgtaaaccattcatcttcgagtttactaacacaccaatgatagtgaagaagcagaacaatcgcttccacttggcttagaaagagaatcgtggaaactcgttcgatgtcgtctctttgaagcttcagaatctcttcttccttgataatcacgtaacttttctcagatagaataattgtgtctaccgcagcgttgtagttgtaggattcattaccaccaccatcgctgttattctcctcccctgattcgttatcgatcatgtcatcatctgaataatccatggccggcggctgcagaaaccataaaacaattttgaggataatttagaggaagcaagcgaaacaaactccttgaaaatttaggattttgctataacaattatctcttctaagacttgatcttgtataaactactactagctagcaggcccagctccgttttattagcaaatcttttaataaatagttttgaaccttttatatagataatttccaatcttttgtagaaagaccaattaattaaaagcttttttagacattcaaaggaaatttcatagcttacacaagtcagaaccaatatgtatgtccacttgtttccatctcgaaaattgaaaatataatatttttaccgaatttatgggtgcaaaatcttgtatttatatattatttatttttgtttttataaatcaaaatcttgtattaaaaaatactgaaaaagataaagatttggtataaaaacctgcagatttggtaataaagtttgtactttatactctatcaaacaagattattggatcaattgaatcaatttgatagagattgatccaattgatagagatttaatcaatgttttagatttgatacaaataaggatactattttttttcctaatgaatatagaaaaatattgtagttacaaggatatagcaatctatactaaaatcgttaaaataaatttaaaaaagttttgagttgtgataaatcgattgggagtttgggactagtggaatgtttttgtatatgactttttttaatgggttgatataattccaaaaaataaaagctgaataaaaacgattgcaaaattacgggcagggtaatcagcccactaatgcttcttttcggcaaacatcagcccattaatttgatatgggctaacgtcaggcccatttttaaagaaatggaaactagaaataagtatagtcgttgacaaaaaaaaaggaaattagactataaaaaaaaaaggaaattagccagctgttatgttaactgaaaaaaggaaactaggagtttcaaaaaaaaggaaatcaggcaccgtcataactcgtaagtgtgtttataaaaaggggaatgcttaagcggagagactcagagactcataattttctcaaaatttgttttgccttcttctttctctcgatcgctagtatcgtgacggaagacgatttccaattatgtaagtaatctttcgattctattgatttctagggttttcttaatcttctgatttctaactagttaactttatcattgtaaagtaatcttctttctctgtttcgcaggtttctctcgatggaatcattcatgaccgaagaatatttgtagcaataattactgtaagaattcttctaattctcttgatttctagggtttctaaatttcaatatttaccagttttttttttttattattcttttagttttttttttccgttttgaagtagctttgatattagagaaaccaaacgaattcgcgtagtgttaattggtttggagtttctgtgaactacaagttttttttcttattctttgttatgttaattgatttgtttaaggggttttggtttgggtttttctttgttttgtttttgtagcgttttggatagtttgctaatcgaaagcgttcaattgttgctatcgattgtggttttgttgctcttgttttgctttgttttgttttgttttgtttgatttcttccattgttttggttttcttccgaacccaagagagatcaaaggcaaacaatctactattagtgttctgtcagattctttcttgggaacattgtcccgtggtgttggcttatgagagatttgatcagagactgaaaaccgatcctttagccacggcttattatatagacaaatatacttgggcttggtctcggttttctggtcaaatatcaagttacgtacacaccttaaactttagtctttagactgaaacttgagactgaacattgatccttcttagtacccacggctttaaaatcacacagacatctggatcatgtttggtttcttgtttcggtctttagacaacagttacccacggctttaaaactgacaagtctttagacagagacttgagggacaaaacattggattcggttatgacaagtctttagacagggacttgagggtcaaaacattggattgggttatgacaagtctttcgactgaaacattggcttgagttatgttggtgcaatgaaaatggtacccacggcttcaaactttagtctttagactgagacttgagactgaacgttgatccttcttagtacccacgactttgaaatcacacagacatatggatcatgtttggtttcttgtttcggtctttagacaatagttacccacagctttaaaactgaccagtctttagacagagacttgagggacaaaacattagatttggttatgacaagtctttagacagagacttgagggacaaaacattggattgggttatgacaagtctttagactgagacttgagggacaaaacattggcttgagttatgttggtgcaatgaaattggtacccacggcttcaaactttagtctttagactgagacttgagactgaacgttgatccttcttagtacccacgactttgaaatcacacagacatatggatcatgtttggtttcttgtttcggtctttagacaatagttacccacagctttaaaactgaccagtctttagacagagacttgagggacaaaacattagatttggttatgacaagtctttagacagagacttgagggacaaaacattggattgggttatgacaagtctttagactgagacttgagggacaaaacattggcttgagttatgttggtgcaatgaaattggtacccacggcttcaaactttagtctttagactgagacttgagactgaacgttgatcattcttggtacccacggctttaaaatcacaaagacatatggatcatgtttggtttcttgtttcggtctttagacaatagttacccacggctttaaaagttacaagtctttagacagagacttgagggacaagacattggattgagttattacaagtctttagacagagacttgagggacaaaacattggattgggttgtgacaagtctttagactgagacttgatggtcaaaacattggcttgacttatgttggtgcaatgaaaatggtacccacggcttcaaactttagtctttagattgagacttgagactgaacgttgatccttcttggtacccacggctttaaaatcacttaaacatatggatcatgtttggtttcttgtttcggtctttagacaatagttacccacggctttaaaagttacaagtctttagacagagacttgagggacaagacattggattgagttatgacaagtctttagatagagacttgagggacaaaacattggattgggttgtgacaagtatttagactgagacttgagggacaaaacattggcttgagttatgttggtgcaatgaaaatggtacccacggcttcaaactttagtctttagactgagacttgagactgaacgttgatcattctaggtacccacggctttaaaatcataaagacatatggatcatgtttcgtttcttgtttcggtctttagacaatagttacccacggctttaaaagttacaagtctttagacagagacttgagggacaagacattggattgagttatgacaagtctttagataaagacttgagggacaaaacattggattgggttgtgacaagtctttagagtgagacttgagggacaaaacattggcttgagttatgttggtgcactgaaaatggtacccacggcttcaaactttagtctttagactgagacttgagactgaacgttgatcattcttggtacccacgactttaaaatcacaaagacatatggatcatgtttggtttcttgtttccgtctttagacaatagttacccacgactttaaaagttacaagtctttagacagagacttgagggacaagacattggattgagttatgacaagtctttagacaaagacttgagggacaaaacattggattgggttgtgacaactctttagactgagacttgagggacaaaacattggcttgagttatgttggtgcaatgaaaatggtacccacggcttcaaactttagtctttagactgagacttgagactgaacgttgatcattcttggtacccacgactttaaaatcacaaagacatatggatcatgtttggtttcttgtttccgtctttagacaatagttacccacggctttaaaagttacaagtctttagacagagacttgagggacaagacattggattgagttatgacaagtctttagagagagacttgagggacaaaacattggattgggttgtgacaagtctttagactgagacttgagggacaaaacattggcttgagttatgttggtgcaatgaaaatggtacccacggcttcaaactttagtctttagactgagacttgagactgaacgttgatcattcttggtacccacggctttaaaatcacaaagacatatggatcatgttttgtttcttgtttcggtctttagacaatagttacccacggctttaaaagttacaagtctttagacagagacttgagggacaagacattggattgagttattacaagtctttagacagagacttgagggacaaaacattggattgggttatgacaagtctttagactgagacttgagggacaaaacattggattgggttatgttggtgcaatgaaaatggtacccacggcttcaaactttagtctttagattgagacttgagagtgagactgaacgttgatccttcttggtgcccacggcttttaaatcacaaagacatatggatcatgtttggtttcttgtttcggtcttagacaatagttacccacggctttaaaaattacaagtctttagacgagacttgagagacaaaacattggattgggttatgacaagtctatagatagagacttgagggacaaaacattggaatgggttatgacaagtctttacactgagacttgagactgaacgttgatccgtcttggtagccacggctttaaaatcacacagacatatggatcatgtttggtttcttgtttcttagacaatagttacccacggctttaaaaattacaagtctttagacgagacttgagagacaaaacattggattgggttatgacaagtttatagacagagacttgagggacaaaacattggaatgggttatgacaagtctttacactgagacttgagactgaacgttgatccgtcttggtagccacggctttaaaatcacacagacatatggatcatgtttggtttcttgtttctgtctttagacaacagttaccaacgggtttaaaaatgacaagtctttagacagagacttgagggacaaaacattggattgggttatgacaagtctttagatagagacttgagggacaaaacattggcttggtttatgtttgaagcaatgaaaatggtacccacggcttcaaactttagtctttagactgagacttgagactgaacattgatccttcttagtacccacggctttaaaatcacttagacatatggatcatgtttggtttcttgtgttggtctttagacaatagttacccaggggtttaaaaatgacaagtctttaaacagagacttgagggacaaaacattggattgggttatgaaaagtctttagacagagacttgaaagacaaaacattggcttgggttatgtttggtacgaagaaaatggtacccacggcttcaaactttagtctttagagtgagatttgagactgaacattgattcttcttagtatctacggctttaaaaccacttagacattagacatatggatcatattcagtttttaatttcggtctttagacaacagttacccattaaaaatgacaagtctttagacagagacatgagggacaaaatattggattgagttttgaaaagtctttagaaagacacttgagggacaaaacattggcttgggttatgtttggtgcaatgaaaatggtacccatggcttcaaactttagtctttagactgagacttgagactgaacattgatcattcttagtacccacggctataaaaccacttagacagacatatggattatgtttggtttcttgtttcggtcttgagacaacagttactcacgactttaaaaatgacaagcaagattatgattgattgaagtctgtaagtcttgtttatgttcaaagattggataattgaatctgattgtctatataatgctgtctgggcagcataacttcaagtctctgcatagaattgccttcattaaggcttttctaatgatgtcgtaagaacgagaaattcaatgatatgcttataagacttgtctaatgatgtctgaatggggaattctcttgcaaggatggaggaataagcaagcaagctgtgattaacactgtaacacttgtcacagttctatatattgctaggtgggcagcataacttcaagtttctgcatggatttgcctttattttaaggcttttctaaaactcaatgatctgcaaattgatggagagtaaattccatgttctactatagaactcaatgatctgcttattgatggagaataaatgttcttttatagaactcaatgatctgcttattaatagagataaagtatcttttataagacttgtctaatgataactgattggaaaatgcattaaaacatgtagttaatcctctttgcatagctcttgaaactcttcctgttagcgaaggcacatcattgtgcaacgcttgatgggtcgaggctcgagcaaggcgagaaagggagagagagataaggcaccaaaggtaagtcatcacgaatctcactgagatatgatattcagtgggacattttgttctaacttacaatattctgcattaaaaagtccaacgtgcagactgtatctttccctcttttaatcaggtaagtgtctctttcgccttccaaaacaaggtatgattttcgtaatatttttccttgatggagtttttagttcgttaattgattacaaccttagatcacatagtcttttataactatttatctgtttttttagtttcacaagaccaagaaaatggagtaagtgtacgtgatctttctcaggtttgacttctctccctgagtttgaaatattatagtgttactcgttgtgtttgaattgttgtagtgaatgttcaatatcacgtacaatatcatatagttataatgtttggcctaacatcaatgaattcgtgactaatactcttttagtttttatattaaacttgtaagacttaaaataaagcacggttaaaggcacttaacgcttacatgtcttagttaccatttgtagaatcaaaatttgaaaaatctttatattctttttgcaggaaccgtaaagaaggcattgtgtacatgcgtaagatgtaagtattgatccaattattattgcaagttttatttatgtcaaagcataaactctttaattctttaatcagaggcatgattggagcttttggggtgtgcgtcgtcttcaacactcctatttccaagtaagtagattccgaagtttacttaatacatttacgcttacgcatgaatatttttagatattttagtattgttggcatatttctcctttggctgcaaatttaatatttccatgtgtgtttttttaggtggattaatttttcctttagaaccaaacctcaattaagcacccacgtctgtagagcacactgatacaaatatacgcataacacgaatgcatacactaaacgtaaacatacacacaaacgtaacttttgtgctcacactaatacaaacataaatacatgacacgaacacatactctaaatgcaattgcttatattgtatgatgaatgagtgctaaacagaagtttatgaaactacttactaaggtttatagtttatataagaggcttatcaatgaactgttagagaagttcatttcgtttgaggagcgttacaacactcagcttgcagcccttaccgcaagttgctccaaaatcacgtcagctcataatacttatgctgaccgagtcgacacttttactccaaggactttgcgaacctcaagatcaagagggcgtttagagtttttacgaccctatccacccgaccctctgagtttctcaaactacgtactgcaaggcctcagctcccaaagtgtaaccggaggaagttctcagcaaccaccaactgctcaaatacctaccacttctgtaggcttcaatgcttctataacccattatagcaaacactaatagataactttgaagaaaatcaatatgatcccaaaagaacaaactatcctggtttttctattcttcaatcctaatttcccaagttcaacaccattttagatcacattgttcacatcataaataactttgaaagaaaccaacaagttacattctaaacatttcgtcctttgaaaactcttaaaaacacattattaattaagcatcaaagattaatcatacagtcactttacctcacaattttagcaacaaactcatcaatattcttatcagaatttcctccatcagacaaagcttcccttgcaaactccatcaacctccgagcattttttctaatctccttccctttctccgacatatcttccataacttctccaacacatctcacaatctcttccttcggaacaaacccattttgatctgccttaaccctaaccccaaccttccacacatcttcaataaacttagcattagtcggctggtcgctataagccggcattcctatcaaagcaactcctaagctcaatgcctctaaagtcgaattccacccgcaatgagtcatgaaacaaccgattgatttatgtgcaagaacttgtaattgaggactccaattcactatcaatcccttgtcacaaatgtcctctatgtaattgcttggaagcttctttgtttcagtttctctaacaacccataagaagttatggccagtttgttttagaccagccgcgacttctatcatttgatcgtcttttaagacggccaagcttccaaaagacacgtagatcactgaaccgggcggttttgagtcaagccaatcaaggcattcgttgacttgggcattgaagaggttgattccgtagtctttgtcacctgctaatcgtttgtctaagtacattgatggaatcatcggtcctatgttcttgaccggccattggtttttcatccattgtagcacctgaaaaaaggattaatacacgcattaaagaaacgttgataggttgattgtatataagatcagtttcaaaatcaatcaaatcaatttcatgcatgcttttatgtacttcattaattacaatcataacatttattgcatctataataattggttgtcaccagtatatgacccacgtcaactattttcttcctaaaacaaggaaacctgtttcattttgaaattgatagataagctgaaacccataaggccataccccaaaaagacactttgacatgtaaatgtgtcaatcaaccgtcccgagtctcccgacctatcgtgaaagctttcggactaaaattcctagtttgaaccaaacatgaccacgttttctaatatcaggatttcaggcttagaaaggacttcaagaacattagatgaatagggaccagtggaagtaataaagacacaataaaaaaggtatcattccctttaatacacgcattaaagcaatttagcaagtatttttaaaaacaaatgtcacatttatacagtaatttgcgaaaatgcaaacatcgttaagaaaaatatgaaataaactaatgaattaaaccaaaagaataaaggataaaactaaactaatgaaactagaattaaaaaataaatcaaattgttgtgcaaaatctcaatttggtcagggacacatccccacatgcctagccagtatgtatgctttcaatggaaaggtaaacggcgtgacacgtatgtatatttgagacgatattcgttttctggctacatatttgccacgttaaattaagaccccaaccaattgcataagatatattataagtaatctgcaccttgggattttcgccccaatcgatatatctatatctttcggccccaagatgaatgatgttctttttgtccgttgaaataatgatgtgttttctatctaatatctttttgctattattatgtaccaacatcgaattaaaaaaatttcaccacgaacctagaaagctacaagtctagctacaactatattggaataaggacttatttcacatcatatactaattggttcagtaagatagtagtatatatcatccacaattatatcacctccaaatatttttatttggattgcattttgcagataattaagaaaaatacaataaacaacaaaactctaaagttgagaattacctcgacttcgagttcgtcgaaagagttaaccaagaagaagtcaatgtcgtcaacattcacgaactggctactaatgagctcaaacaacggccggcagagattgttatcgtacagaaacaccggtaagtcattacccttcagcggaggcattgcaggcaaaacgacatcattttgaaactccttaaactctccacgcaagaaatgaatataggtcgcgttcacggtggaggactgagtgaaaaacgacgccgcagcaacgccaggatgtttccggcaaacgtcgaggacataaggcaggcacgagtcgtaaacgacggcgtttggttttgggtccatcgaggagataagctctgagaggcttcgagatacgttttcttggaactttgcgaagtagtcgggagatgtgtccgtagatgggtgatcttcctcgaatccatcgtcaatggggacaaaagagagaggaagagcagtggctccgccggtgatggcacggcggaggatggagttgtgggtggaggaagtggtgaggaatgtgacgttgacgtttttagagagtaggcgttttgagaattggaggagagggtttatgtgaccttgtatcggaaatgagaagactaacacatttgctttcgctttctctcccattgtttttctcttctttttgttgaaatttgttacatacaaactcttactctgttatgacggaagtatttatcggatatatgcaagtatgcaacgtagaaaatagtagttataggcaactttaatataaaagatttgtttctatatgtctctttaccaaatagaaaagttaaaaggggttggtgggttagtgatttggttaattataaggtattcatacaaatggcctaaggatcgtaaattcttaaaattagtggtggatactattttagatatagggttcaatatatccgccagctagattcctcctcctcgatgggttatttttgttttttatcaagcagatgtcgactaaagaaaccatttatcacttatcagagtacataaaattaaaataagctaagatttggatttatgctattggatgagtttgtcaatatattataccatctattgcatatatcttctaaagtttatcttaccattaaatatatttttagaatcgttggaaggaaactttctttttaattatatatatagatgatgttttgactatatgttatatcttaagacactcacgaggataaataatggtttagcaacatccatccttagacttgtattttcaaatggtaccttgttttcgaagcatctggaaaatgaattaaaataaaataaaattaatcatagtcttttcatggtaatatatgtccttctctcgtaacgtttagagatttattacattaagaaccaacatttttaagttccaaacattcttgacgggataaataaagtaagacaatcgtgtggctcagacccatgtaagtaatcatctttcacaagaaactaaagaaagaagagaagtattttggatgtgagtttggtttgtgaaggtatatatatcaatgtcatgccatgtgccgtatgctttttgtattcgttaggtttgctctatatatcaatacaatgactctgacaacaaaacagtgactgcccacaatgtatgtccatccaaatgaatgtgcaatttaataatgacttaacgagttacaaaaataaaactaaaaaatgcaaaaagaaattaggtaacactttttttattttttttaccaaaatgtagatggaagttcgggtgatttccgtattgcatgccaagtctgcacgtccaaactacgaaaaatgacatatcgtttttttttgttttttattttgttttttcatcgtctagatacctgagtttcattagcatttagaggatgctatgcatatatcggtatcaataatatggtcttcaaaatgaaattctctatgttaaatcatttatgatgtatccttttagttacgtcataaccaatgtgattcgtttttcgtctccgattaaacacatatatttttcgaagttttcaaataaaatcttttgacattaaatattcgaggtgaaatgtgacaataatcttttcaaataggttaacttttgtcttttatacatttttaacgtatttagatataaggatcgagagttgtataatgtgacaataatttaccataactttaaatatacattcggagtaatgattgatgatatgttgtttatatcgaaaacaaaagagacttgacttgatatacctgttcatatattcttgtcatcttcggagaagagagacactgccatcaaattatagctattgatgtcattgcttatgtaagcatgaaaccccaattgcaaaagtgagaataactaaaaactaaaaacctttcaattcaacttttggtttatctaatggtaggtgccaagtttttcttgaaaaatgaacaatttagcatccatatatttgatggcagtgtctctatccattatgacaaaaaatgtatccatatattatataaaacaaaaattctgatataaataaattcactttcgatttacttaaaaaatttatgattctagatagccgattataaatttttgtttagtcaaaaaaaaagaaagtttaaaccgattatgagaattcatgatttatcaatcaaaacacatatgtatgaggcccaaatattttatcttcaacattctgacccaatttaagcccacagcagactctgactcgatggttttggttagctttccggttcggtttggtttaattgattagtttcgattcgactttgaaccaaatttaaaccgtactccgacttcagcatccaccacctccaagtcttcgtcagtcgtcaccgtgtggtaagtgtaaatccttaagtctggaaaattagggtttttgggacttgggtgtgtttccatagcagagatatggggaagaagaaaggaaacaaagcagcagcttcaacagatgattttttacaaaccctcgaagatttcaccagcaaagagaattgggacaaattcttcactctcagaggcaacgacgactctttcgagtggtatgctgagtggcctcagctccatgactcgcttttacctctcctccaagattcttcatcttcttcttctgattcgcttcagattctggttcctggatgtggaaactcccgccttactgagcatttgtacgatgctggattccgtgacatcactaatgttgacttctccaaagttgttatctccgatatgcttcgtcggaacattcggactcggcctgaactgcgttggcgagttatggatataacaaagatgcaggttttggttccttttgtgctctgtttttttttggtttctagctgatccttgttctgtctctcattcactaaatatttttactttttctattacgcagttggctgatgagtcttttgatacggttctagataaaggtgctcttgatgctttgatggagccagaagttggtaccaagctgggaaatcaatacttatcagaggtcttagtgaacttcttttgtttaagggattgcataaattggatgagtgttggatcaaacaatgaaagttatgtgctttaaatgcttgagcttgattcagtttgatcattagtaactcttttctcaggccaagcgggttttgaaacctggggggaagtttatttgtctaacgttggcggagtctcatgtcttaggtacacctccaacacctttgcttctgttattattattatgtgaagctatttcatagttattgttatcttcattctattgtctgttttagtgacattcttagtgtttttgcgcagcattgcttttttcaagatttcgttttggttggaagatgaatgttcattcaattgctcaaaaacgctcgaagcttaagacatatatggtggtggctgaaaaggaaaattccgttttgttgcatgagataacctctgctttcgaacttgtatctcttggccgcaatgatagtcaggtaattatttcctgtttagtttgactttaacacaattgtaaattcaaccacctttcccttcatatatcgattttttctagctctttaaaacacttgtgtaattctccagtgtaatatatgattctgacttacaatgtagggttctggcatgcgtgaagccgtcgagagcgagaacaaaatacgtagagactgcaataatggctcagacttattgtactcgcatgaagatttgaaacttggtattaaaggagatttggcagagcttactgaaggtcgccgtataaaatttactttgggtggccaaggaagcaatttcagttatagggccgtgcttcttgatgctcagaaacaaactgagccatttgtatattattgtggtgtttttcttgtccccaaggtaagctttgtcaacatcataaatccttaatatttaagttctggaaattgctgtgaatatattgtttaattttgtttgatctattaaaaggagtgttaaatttcagactcgtgctcatgagtggctgttctgttcagaagaaggacagtggcaggttgtcgagagttctcaggccgctcgtctcataatggtaagctttttatggtaaaacctctttatatacaccatgttaccgtgatctattttcggcatgagattctaaacacatcttaatttcttgatgaaggtttttctcgacagtagccatagtggagccaccatggaggatatccaggtaggtactatctacattttgagttgtctgatgcattatgttgtttacttattgatcgattttatctggtaacttattcatctcagaatgatttatctccaatggtgacacaactagctcccagaaatgatgatgaagctcgcattccgtatgtttatcggattttttttttactatattctccatgatttttggtgcaacagtaatcctaactcattttgtttccgccattattgcttgttaattagtagttgaattgaattggtgctgtaggtatatgatggcaagtgatgggataaaaaagcgtgatactgtccacgaggtattattactagatatacccaattaatcacttaataaaactgttatttgttgtctcttctatttctcgcctttcacaaatatgatcatcgtttcctttattgatctccgtgattagacttttatccaccactattttagcaaattttaatactactgattggttagaatacgtagttatggggatcttttttgtttcttactattcatttcgatttgtaggttacatctcctatgactgggaaagtggttgttgaagatgtggtttatgaaagcgctcctagtaatttagaagacttgtctacttctagtgatttggcatttcgacgacttgtattcaaaaggactgagggtttgatacagtctgaagctttgcttgtagaggatggtgagattcttgaacagtctcagaaagaaaaaactaaaaatgtttcccaatcgaagcgaaagggaaataaaaagcaaaaccaaggtaaaaatcgtacttctgtaagtgttttgatacatttcaggtgaaaagtttcatgatcttttttacatgtatccatttcagaaccgagcaggcctcttatgagggtctctcatgattatctggctagctcttaccacactggaattatttctggattcacattggtatcttcctacttgaagaaggctgagtcatgcggaacgatggtgagcattattaagttgtggcctcacggtgcaaccgatctgaatcttttctttgccttgtactgatccagaaatgttctgatgcttttcaggttaagactgttgtaattggtcttggagcaggattacttcccatgttcctccatggatgcttgccatttttcagtattgaggtaatttcagtttaaaggattaatcaagttgagtattttctattgccactcatattctgtatcctgttgaataggcggttgagcttgacccagtaatgcttagtgttggcaaggattactttggtttcacacaaaatgatcgcttgaaggtaaaattctccctctttacaacaaaagtgctggctaaactttaacatgtttatattctattctattatatgcaccatcactcagctcgttcgcattcttataataggtgcatattgctgatgggatcaaattcattagagatataacaaactctgaagcttcgtctgaggaatcgtcaaacattggctcaaatggagattcaaccactcacaatacacaaggtggaatttgtcctgacattttaattatagatgtggattcagcagattcaaggtaaaagacatggcaagtaaattcacatatctatgaatttacccacatggtaagcctgattgttttcttgtttgatctcttgtctgcagcggcggattaacctgccctgcatctgattttatcgaagagacatttcttctttcggttaagcaagctctccctcagcacggtcttttcatagtgaatttggtcacgagatcacagtccgtcaaagatatggtagtatcaagaatgaaaaaggtaaagcaaatgtgattcattccttgtaaattctctgcatattttcacaaatctgatctgatactattgcacggaaattgagtcatagaattgatctctattgttttgttttttgccaaggttttcgatcatttatttggcctgcaactagaagaggaagatgacgtaaacgtagtgctctttgggctttgctctgaatctgtaatcagcgagaacgatattccagaatctgcagttatactggagggattgctcaagtgccagagattggaaacgaagcaaagcatcatagacgctacaaagaagctgaaatgctggaaataaaaacattctttattatttcgttttaaaaagacgtgtgagatatatttctgttataagttaagattgaaatttttgagactatattatatacaatacacctagtttcgtccatacgcaaatggaaaatgaagcgtggagtttttttcataacctttatgattgttagacctaccaacttattgaagcattcaatttggatgatagtgaagttggaatgtaagttaaacatcaatgtcttgattaattttgtgcatttttgggaactatccgtattgtttctgatttgagtgatcttccttattgttgctaagaaatgctcgaatggtgattagcataattgctgtttattcattggagctataataattatggttgtaatattgtaatttgggaaagaaagcctttgatacaggccgattttggtacgtacgtaagagagatataaattgaaacacctaaaccaaaatctggtcgccgcgaagacaaaagaaaaacatttgtggcaaagaaacaaattcagaaaccgcgtgggtccgatatggaacgctgatcaattggacatttgtaaacatttcaaatattttgcatgtaatcaatattgttgttatattttttgccttttagttatagttaggtttgttttttctgtttgtttggttagattcaactatttgtttatgcttttcaattttgggttagtatttagctgtttactttggagaaacaaaagaagatagattctgttccatataaacaaaaagctgtgtcgttgaaacttgaaaatgtgaatatactcggatatcaaccaaagggtacgctgcattaaccaacctccctcgtagaaaatttcaaagaaaggataacaaaacaagaaaaagcacaaagttgaaaaagaagtgacagatgcagaagaattggtcaaaatcattttgacaaaactacataaaaaacaatcaaatgtcactttcaaaattattagcttatttattattttattatgaaaataatgaaagcgacttctatctgggactggtaaaaggacctctctcaccattggttgtacattagctgtcaaatttttacatttccattacattccctaactccaaatatatacactaaactaaattcttcaagttacttcctaattactactatagtaattatttcctaaccgtcaaatagtactgaataacacatataatatagtttcgattgattaagagatttgaattaaacagaataaagttttacgattatatattctaacaatttatttgtctcacaaaaaaatctatagatttaatgagaattaaatgaagaggacgaaaggaaaaacaaaatgaagaaaaagacatatgaaacgtagtcccctcttttctttgctttcttctctacataaaactaaaactcctctctttcacgaccctttaagtaacgacgccgttttcatccaaacacaaacctctggaatcgtgtcaccgttggagctccggcttcattaatggctttcttcaagacctgaagacaaaagaaagtaaaaatatatatacactagagagaccaagatcctcgtttatgggtttcatcgtgtcttgtgcttagggtgacataaatacccatttagagagcttagaccaagaagttttagagtttgtgaagttacttgttggttagtctgctgtttctggcaaatgctgagtctcttctctctgtaagttcttttttcttcatttactctgttttgttccccatttttggtctttttgacttaacttagagtattttaaggcaaaataaaatcatgaatcttttggtattttttgttctcatcttcttgtggggtttttctattgaagtttgcttagctttgaatcttgtctaatggagctaactcgatccaaaataaaaacacgtataatgattaactagttctgctcattagatgaactaaattaatgagttaattccgtagtttcatgcatcctacaatgtattgtctatgtatggaagcaaagtatgatatcatatttaaacatctatgattgtgctactaaactttaaataatactttaagctgatgtgatcttatatggataacctctgaccattatctactttctttgaccattgctcttgttttctaatccaaaagtcgtatcttccaatgcattagttggtccaaacctagatttgcatcccttaatttgtagtagttaacatctaattttgatgttaaaaccaagacaccactttgtttgtctggtctgagaatatctcaaggcgtatagttttgtccttatgacgcttgcaaaagcaagttgttgagttgtaatcttatgtttttttctgcaacttgccttggatgaagccatgagattatctttataaatggtagcaagtaaaccggtttcttatgtcgaaaaaccgatcatttttgttttgtttgatgacaaggaatggaatactctagagactcggcagagatgatgatggagactaagcgcaatgtctactcgcttgaagataacaaaattaaacgacacaagtcatctgatctctctttctcttccaaggtcttgtgatacatcaaaatcaaaattcattgtggctatgaagctaccggacatttctgtaccagcatgctaatgatcttgaaactttgttgttctgtggtttaaacaggagaggaaagacaaattagcagaacgtatttcagctcttcaacaactagtttccccttacggaaaggtactacttggtccgaaataatctttcttacacgctctttgtcttctctagccatgttcaagtctctatctatgcagaccgacactgcatcagttcttctagagggaatgcaatacattcagtttcttcaagaacaagtcaaggtctgctcaagttttctaatcaaatacttttcattcattcacctcctccaatccaatgatgattatgcttgattttctctgttcaggttctaagtgctccttatctgcaagcaaccccttctactacagaggtgagctgaatctatgatctggatctcgtttacttggatcacaatgcaagactgatattttccatctctgtaactaggaggaagtggaagagtacagcttaagaagtaaagggctatgtcttgttccattggagtatacatcagaagttgctcaaaccaatggtgctgatatttgggctcctgtgaagactccaacatcttctcatgcttttaatctctcgtcttctaattcgccctttcaatgagctgctgctaaattctctgtctcaagactaatgaaaattagccaaagctttggtctgatcatgtattgatggagagaccttgaagtcggtgatggctgtttctgttattttttactgcttaatcccaactctgtggtggcttcttgtaacaattgattctaatgcgaagtttaacggaccggtcaatgaccggaattagcttcctgtttaataaagtttgaattggtgaaaaagagttaaccggtttagagaaacccgggaaacttaacccgacccaaaattgtcaaacccgttttgtttgcggctattgaaggatcttctattgaagagagcagctagctaaaaccctaaagccctaaaatcaaaattacgctaaacagagaaggcgacaatggatcacatcgctgcggcggaagagcaaatcgtatcggagagacttcgaagaaagcttgaagaagttaatgtagctgctcagactcagctttctcctatccaagatcacatcaatttcacccttcaggtatatacaaaaatctgtacttttcgcgagctcagcataaattctctctgatataacaatttagcaatgttagcttctgaatatggaatctttattggtttgatacaatgctagtttcaaatttgatgaattgagtaggttcatgaaaaaagtctgaaaatttgcatttgggttcgtactatattcgtctttagacactatggattaggttcacgacaattgctctggtttaattactatattgtgctctgtaggatattcgataagtaggcgtgtctcgttgcataacaattgctctgctttgtcttcagaagcatgagagttattaacaccttctcttgtgtttttgggttgctatattgagttatatgatccgttgattcaaattaattaaaccctgacaacgatatcattgttgcagcaagcttatttcaaatgtgcatatgagtgctttgatagaagaagaaagcaagaggagataagtaactgcgtcgagcactgcagtgttcccgttgtcaaatctcaacagtatttcgagaacgaaatggctcaatttcaggtaaagatatctgctaaaagatgatacatagtttgctgtgtataaagactgatttttgttgaatgaatgtataggaaagattgaacagatcactggtggtgtgtcaagacaagtttgaggcctcaaagctccagaagataaggcctgaagcggttaacgagatggagagttgtgtgcacaaatccattgaggaaaatctcaatacattaccacatattgtgcagagaatgaagacagcatttaacataaccaactaaaagctctcgtgaaaaaccttggattccagaacttgactagccatattgtttgaaaagaccttttcttttgtcttaatatgatctacaaatttgttttcctttttcttatattaagttttaaaatttgccactgttttggaataactgtatttgcttgttcttcatcttccctagcgaaaactttaaaactctataaaaaaaaattgaggataaatacatgaatttaaagattgaaccgaacaaaagagactaaccaatagaatagaagcaagtaatttagtgaatatctaaaactaatataaaaatatatagagattatcactaacaaaaaaaaataaaaaataatagagagttatatatacctttgttcgtttgtgaaaggaattgacaatcagaatcatataaaagcaagactataaactcctctctgccgcttaactctttcttcttgtctctctattttttataacaatggtgagaggagatgatcaacttaatggtttgcagggagggaagagagcgttagatattttatgtgtagcgacggagagaacggttagcgcttttgcatatgaggaaataggagaaacatccactgaaggtgataaaaggagggagagactgagaagactgagaagattaattaattacagtctgagcacaactatgaattc

SEQ ID NO: 318 - DNA, 103194 bp, Arabidopsis thaliana
gaatttcttctcatgcgatatcttatatttcttttctcttctgcagaatttaaagtagccataactgttcgatcataggatggaagaagcaactcaagtaacgagttctgaggtccctgtagtgaaaggtgatgttgatgaccttaagacagctgatatttccgtcaaggtaatgatcattagtgttcggtttcgtagaattatctgtttcctcttgactataaggaatcctttctgtaaattgatgcgaatcttgcaaagattttatttgttttatcgaattgaatctcctgtctgtctatcaagcttcttagtagcagcgccaaagatgtaagtattgtcttgatctattgcaggctgtgaatggagaagtgccaaaggaggagaaagaagaggaagatggggaattcataaaagttgagaaggaagcttttgatgccaaggatgatgcggagaaagcagatcatgttcctgttgaagagcaaaaggaagttattgaaagaagctcgagtggttcacagagagaactacatgaatcacaagaaaaggcaaaagaactagagctcgaattggaaagagttgcaggggaactaaaacggtatgaatctgaaaatacccatttgaaggatgagcttttgtctgcgaaagagaagttagaagaaacggaaaagaagcatggagatcttgaagttgtccaaaagaagcagcaagagaaaattgttgaaggggaagagagacacagctcacagttaaagtccttggaagatgctttgcagtcacatgatgcgaaagataaggaactaactgaagttaaggaagcttttgatgcgttgggcatagaactcgagagctcacgaaagaagttgatagagttggaggaggggctaaaacgttcagctgaagaggctcagaaatttgaagagctgcataagcaaagtgcttctcatgctgactctgagtcgcagaaggctttggaattttcggagctgcttaaatcgacaaaagagagtgccaaggaaatggaggaaaaaatggcgtccctgcaacaagaaatcaaggagctcaatgagaagatgtctgaaaacgaaaaggttgaagctgccttaaagagtagtgcgggagaattagctgcagtgcaagaggaattggcactttcaaaatctcgtttgttagagacggaacaaaaagtgtcttccacagaagccctcattgatgaactgactcaggaacttgagcagaagaaagcttccgaatctcggttcaaggaagagttatccgttctccaagatttggatgctcagaccaaaggtcttcaggctaaactttctgaacaggaaggtattaattcaaagcttgcggaagaactcaaggagaaggaacttctggaatccttatcaaaagaccaagaagagaagctgagaactgcaaatgagaagttggctgaagttttgaaagaaaaagaagcgcttgaagcaaatgtagcagaggtcacaagtaatgtagcaacagtaacagaggtctgcaatgaactagaagagaaactgaagacctcagatgagaatttctccaaaacagatgctcttctttctcaagctttgtcaaacaactctgagcttgaacagaaactgaaatcgctggaggagcttcattctgaagctggatctgcagcagcagctgctacccagaagaaccttgagctagaggatgttgttcggtcctctagtcaagcagcagaagaagccaaatcacagataaaagagctggagacaaagttcactgcagctgaacaaaagaacgcggagcttgagcagcaactgaatttattgcagctgaaaagtagtgatgcagaacgcgagttgaaggaactctccgagaaatcatctgaactacaaactgctattgaagttgccgaagaagagaaaaaacaggcgaccactcagatgcaggaatacaaacaaaaagcatcagaattggaattgtctctgacccaatcatcggccagaaattcagagcttgaagaagatttgagaatcgctttgcagaagggtgcagaacatgaagaccgagctaatacaactcaccagcgcagtattgaactagaaggtctttgtcaatcatcacagtcaaaacatgaagacgcagaaggaagattaaaagacttggagcttctactccagacagaaaagtacagaattcaggaacttgaggagcaggttagctcgctagaaaagaagcatggggaaactgaagcagattctaaaggttacttgggtcaggtggctgagcttcaatccacactagaggcatttcaagtgaaaagttcaagcctcgaagctgctttaaacatcgcaactgaaaacgagaaagaactgacagaaaatctgaacgctgtgacgagtgagaaaaagaaattagaggcaacagtggatgagtacagcgtgaagatcagtgagtctgagaatctgttagaaagtatcaggaatgaattgaatgtcacacaaggaaagttggagagtattgaaaatgatctgaaagctgctggcttacaggaaagtgaagtaatggagaaactgaagtctgctgaagagagtcttgagcagaaaggaagagaaatagatgaagctactacgaaacgtatggagcttgaagctttgcatcagtctttaagtatagactcagagcatagacttcaaaaggcaatggaggagttcactagcagagattcagaggccagttctttgactgagaagttgagagacttggaaggcaaaataaaatcatatgaagagcagttggctgaagcatctggcaaatcttcttctttgaaagaaaaacttgaacagactttgggaaggcttgcagctgcagaatctgttaatgaaaaactcaaacaagagtttgatcaggcacaagaaaaatctttgcaatcatcatcagagagtgaactactagcagagacaaacaaccaactcaagatcaaaattcaagagcttgaggggttaataggttctggttctgtcgagaaagaaactgcattgaaaaggttagaagaggcaatcgaaaggtttaatcagaaagaaacagaatctagtgacttggttgaaaagttaaaaacacatgaaaaccaaatcgaggagtacaaaaagctggctcatgaagcatcaggagttgcggacactagaaaagttgagcttgaagacgcgctatcaaagttgaagaatcttgaatctactattgaagagctcggggccaaatgccaggggcttgagaaagaaagtggggatttggccgaggtgaatttgaagttgaatctggaactagccaatcatggatctgaggccaacgagttgcagacaaagctctctgccttggaggccgagaaggagcaaacagccaatgagcttgaggcttcaaagacaaccatagaagatctaacaaagcagcttacctctgaaggggagaaattacagtcacaggtaacaccctgaatctaaacatgtgttaatatctacagtgtcacagttttgttgtctataatacaatatgacaccactttgtgctgcagatttcttcccacactgaggagaacaaccaagtcaatgcgatgtttcagagtaccaaggaggagctgcaatcagttattgccaagcttgaagaacaactaaccgtagagagctctaaagctgatactctggtctccgagattgagaagctcagggcagtggctgctgaaaagtccgttctggaatcacattttgaagaacttgaaaaaactttgtcagaggtcaaagctcagttgaaagaaaatgtagtgcattcttctcagacagaggaaattatcaatatcataattaagaatccataggtaaaaatattggttgctaattgatgacgtttttacaggtggaaaatgcagctactgcgtctgtaaaagtggcggaattgacctcaaaactgcaggaacacgaacatattgctggtgaacgagatgtgctcaacgagcaagtgcttcagcttcagaaagagcttcaagcggctcagagttccattgatgaacaggttaatgttctttcttttgtttcagctttatttatctcagatataaccttttcgggtttctttagaactctttagtttgatgattaaaacaaaaaaaaagaagacaatctatcttccctcattatgttactaagatctgaaaacgtttccatggaaatagaaacaagcacactcccagaagcaatcagagctggagtctgcattaaagaaatcacaagaagagattgaagctaagaaaaaggctgtcactgaatttgaatcaatggtcaaagatcttgaacagaaagtgcagctcgcagatgctaaaactaaggttagtcataatatctctgcatcagaactttgattgactgataacagacatgcaatgcatatattataacatctagagggacaaaatgacataagatccataaaattagagacagaaaccttgcattatggtttgtcaaaatctcaatcgcatacttgcttataatcaaaaaccaaacttgcaggaaacggaggcaatggatgtaggtgtcaaatctcgagacattgacttatccttttcttctccaacgaaacgtaagagcaagaagaagccagaagcatctctttcttcttcttcgtcttcgggcaatgttactactcctactcaaacagcatcaacttcacatctcatgacagtgaagatcgtcactggagtggcgctgatctctgttatcatcggtataattcttgggagaaagtattagtctcgtcttctcagtgtggcttgatgatgttcatatctgaaatgaagatctctccttcttcatttgttttttttgggggtttttgaattttgatagcagaactaagaagctttgcgtgaatatgcttctctctctgctaatatttgcttgtggttgggttttgttttaccgggtctgggagattttgttgtaccagcccttgcttgtaggtcaagcaattgtccagatattgtattaaattaaatcaaaggtgaattaatttgataattatccaactaaaccagttggttaacaataaacccggttcaatcgacccgcattcgcctatataaaccccactccagtgatcgtcttcttcatcaacttctcatttctctctttcgcatttgaacttttaacagtactgagatcaagatggcgacgctaaacatggcggaaaccctagaaaccctaatcgctaattcccaagaagttgattactcctacgatcccgaagaagatgacattgatctctccctcctccgtctcaacagcttcggaaactcctctgatcgccgccgtgcgaattcctctcctccgcaattcaaatcgtacggatctttcggttcctcttcaaccaccgcaacaaccagtcccgtgaaacgtccatcgccggaatcgaagcaaggtgacgagccgagacgcaagaagctgtttattccgagacctgaggaagaagaagacccgaatctcatgggatattcaaagattccgcttcctgtggttgaattcaatccgacgcaaatccgttctcctctttacaagcgatctttatccgatacatttgcttcgcccgttggatctacattcgggtcgggtgggtcgggttatacccgtaacagcgtcgctcaagaaacatcacctccttcgggtaatgtcccttctctcccgccacgtccacggatgttccggaggtccgtctctgatctttcgccggcaccgtcctccaagtctcttcttggatcttctcgctccaatgcaattcctgaaggtgatctcgcgaatccagaaagctctgatgccaataaggttcgaaagcttctattgccttttggctctgttcatcttttgctatgttaattatctgattcgtttgagaaattctgcgatttgagaacgaagtttaagtttcttgttgatgtcattgatcatacagagataaaattgatttgtgtctttcgaagtagagatctgttgtgtgtaagcttactcaagatggtgataatggcagatgctgtatattatcaaggatggagttcgtgaattggatcaatggtgtaacaagcttcttaagtacggtgaagcagtctcctctggctctgtgaaacaagacgacagtcctaaggttcgagaatcttcttgacacacaatctcaatggaatcttgctggtgaaatgcatttggaacaatcgtattggtctatcaaacatgtccttcattgagttgttcatttacttggctcttatctaatctctgagttaaagtcctgtttttaagcacaatgattgttgctcacttacttgtctcttatgatcttctgagtttaagtcttgtttttgagcacaatgattgtttgttgcggtgcaggcagtagatgaggtagtacaacaagaggagcaaccaaaagagtgcaaagaaggtgtgaaggtcaacagactcggtgaggcctttgtggttgagatcaactgtccatgtggaagaaactaccaaactctcttctcaggccgtgactgctactacaagctcttgtagaatggtgaccgctacctttttgcagttgttagacattcacattctttgatcatcatcaccattagttgaaggatctatcatgctgcatattcatcacaaaggttttctgtagataagaagacattcacactctgtttcatgcttgtatagatactaggtagctatacgttccattgtcatatactctcttgtgcattcgcttacttgtaatactcttaaatatgtttcattcgttaaaatggaagtgatttcttgtgtgtttgttatcattcttcttttaatgttttatgcgctaaacaatgttgtaaacacaagacggaaccatgaccggtctgggttttatctagatcagtaagtttgtaacccaaaatcaaaattgacaagccgaaaaggagaaagaaaaaacccaatttttaaaaccctagcgttttcttctaaagccctaatgtgtaaatattaggccgtttttgggcttcacaggatagaaataaacagagtacctaaaacgacgtcgttagaaagtagcatccaaaatctctatcccatgacactcttatatctcaatctattaaccttggagataatccatggtgaatcctgaaggacaagctgtgtcgaccaaagtcgtctttttatcttttccaattttcccaccagaaagaaagtttctctctggttcgatgtaagttctttttctcaaaattcttatgtgttgccttcaacctgttcgacgatattacccaatgaacaatttccatgtttcttcacatttctactcctttttatcgactactaactcacattcttacataaccaatatctaaagttttgttcttggactttgtttcggatatattgtaaattgcccgtatatcaaaggttttcaattttgtcttctctgttgttattgctctttatttctcgataatgtatagactatagagcttttagatgcttagactaagtgtaaacagctcatttttttaattcttgaatattttcttcctgtctcttgcagatgaattcgactgagaattaattcttcaacaagcttgagagcaaagttatgctgcgtttaacttgttttacaccttctttttctcgagcgtgttgtcctttatttgcaatgatgctcaaagtcccatctgttcatctccaccatcctagattttctccatttcgtttctaccatacttccttacttgtgaaaggcaccagagatagacgtcttattcttgttgagcgtagcagacatctatgtacattgcctctcgctgctgctaaacaatcagcagcttctccttctgaaaacttatcgaggaaagcgaagaagaaagctattcaacagtctcctgaagcattgctgaaacaaaagctagatatgtgctctaagaaaggtgatgtcttggaagctcttcgcttgtatgatgaggcaagacgcaatggcgtgcagcttagccagtaccattataatgtgttgctttatgtatgctcgttggctgaggcagcaacagagtcgtctccaaatccagggcttagtaggggttttgatatttttaagcagatgattgttgataaagttgttcccaatgaagctacatttacaaacggtgctagactcgcagttgcaaaggatgacccggaaatggctttcgatatggtgaaacagatgaaagcctttggtattcaaccaaggttgagatcctatggacctgccctttttggtttctgtaggaaaggtgatgcagacaaagcttatgaagtcgatgcgcatatggttgaatcagaggtagtccctgaagaacctgagcttgctgctcttttgaaagttagtatggatacaaagaacgcagacaaggtctataagacgttgcagcgattgagagatttggtgagacaggtttctaaatcgacttttgatatgattgaggagtggtttaaatctgaagtagctacaaaaactggagtgaagaaatgggatgtgaagaaaataagggatgcggttgtgagtggtggtggtgggtggcatggacaaggatggctggggactggcaaatggaatgtgaaaagaacagagatggatgagaatggtgtatgtaaatgttgcaaagagaagcttgtttgtattgatatcaatccggttgagacagaaacctttgctgcatcgttgacccgattggcatgtgaaagagaagtcaaggctaattttaatcagtttcaggtaacaattattgtctaaaagattgtattaaaactatctaaaagaaaacctgagaaatgtgttgttgttttttgcttgcaggaatggctggaaagacatggaccgtttgatgcagtcattgatggagccaacatgggcttagtcaaccagcgcagtttcagcttcttccaggtggttttgactctttctcattctaatgccaatctcaagaaccattgtttgactactttatctaatgcgactctttatctctccccactagcttaacaacactgtccaaagatgccaacaaataagcccgtcgaaaaggttaccacttgtgatcctgcacaagagtcgtgtaaatggaggtccagctacataccctaaaaacagagccttgctagagaaatggaaaaacgctggtgctctctatgctacccctcctggctcaaacgatgattggtatttgcatttgcctttttttctgggtctatgaattacattgaccatgaataatccaaaaaagacaaccatttcttatgtgaaatcaaattgttctaggtattggctttacgctgcggtaagttgcaaatgtttgttagtaacaaacgatgagatgagagaccatctcttccagttacttggaaatagtttcttcccaaggtggaaagagaagcatcaggtaacatataatataagagtctatgtaatgtatatacataagcttttgattgatactggattcaatgtttgcaggttcggatctctgtcactagagaagatggactcaaacttaatatgccacctccatactccattgttatacaggtcaacactcacatttctatgtccatctcaatgttttcgtatgcattttgcattaatgatgatgattgattgatgaatgatgcaggagtctgaagatggaacctggcatgtaccaatgagcgtagaagatgatctccaaacatcaaggcaatggttatgcgcaaaaagatccaaaacaccttgaatttttttaatccttgttgtatcatctgacattgattcttcatttcttaataaatttgtgtttcattaaccacaagattgaaagaaatgtctcacaatgaagagttactagaaagattaaaactttaaccatcaaaattgaatatatattactgaaatttagaacaaaacataaccttgagctaaaccagaagcaaaaacaattcatggtagataaaaattgaaactttaaaactaaaattaaaaactgtagaattcaaaacctaagcttggtgaagaaccatctgttcttgccagtcttaaacctctcttcaaacttcgccttcgcttccttaagagccgtcactttcttatccttggacgagatcgcgtcggcggagacaacgttcttcagatccaaatcaagagtgtagcgcgtaggcatcacgtgctggtaattgatgaccttgaagaagcatttcacgcgcgatttcttagccgtcttctttgccgaatccttgcgaatgactttgcttgggtacttcttcaatccggcgacgagacagtgaccgtacttcttctcaacggtaccgtcatcgaaggatttcacgatcaccgcctttttaccggtgtatcgtccttgtaaaaggatcacggcttttcctggcttcatacatttcaccattgtcactctcttctctgtctttctctcggcgcttccttggattctagggctttatcgggagatatttatacgcatcgatttgttcattatttgcattctaaccccaagagttttaattgtttataactttggcttatatagtgttattaaattgattttaagtccacgttgactaaccggtaataaagtcaaaaatgtgaatctagcgtggtttagaagatgtctaagagaaaacaaacgatatattaagaatttataaaattacacaatgcaaaagaaagagtgatatagaaatgaattaacaaatagaagtaccaaatgtcataaacctagtcgaatcattttggtaaagcaaaatacaaagataatcaaaataaaccatctaagtcttcagaagcatgcgtcgaggacacaacaacaacacatggccgcaagactgcattcaaaaaatgaaagaaaacaaattaatcaatgcaacacacgataaccgaaccggtttgatagttaaccaaacgtgcatgcctggtttatactagaaaaagaagactaaccagccttttaagaatccatcacccttggactttgtctccaccgttgccaccgtggcatgacttgtgtcgttcgttgggtaacctagcggtggcggtgccacgtaagggccggtagacactggcggcgtaggataagctcctataagttattcatatttcacattagtcttattaccatttaaaaaagtacttactactatgaaactgcaaatatgattataaccatgagaatattgactaaacatatggtctgatgctaaattagtacgaagaaaagaatacaaacctgaagattggttttggctgtattgactcatcttggaacagatagattgtgatttctctttgaaaacaagttagaagaaagtagtaacaaatgtagagaggtgtatgattatgaaatgaattgaaatatgcaaatgaagatagagatatatatatagagaggtaagggaagtaaacgaaggtcggtttagtaaaaccgcgtgaggtcaaaaaaaaaaaacgcgtgaggtcagattgcattaactgctaagtctccagaaatttattctcttgaagaataacaatgtgttgattttttctcttaataaatatcaacaaaaaggtaagatgctatcgatttggtcttttaattcgttgttctctatttacaaaagtatacgaattagagaaccttatatatagaatatgtaaaatgatgataaatgcagcatggttttatatttttcttgatttagtaataataaagagtttttttattctttctcaaagcaaaaagtgtacttctttctccatgggaatatttacatgttaagcaaaagagagaacaataattaacgcttatattaactaataaaaactaacaaaagtagatcagaatatatatgttattagaagttatgttttacacaaacggatcttagataatagtttgaaccataataattttacttgaatcgctttatctcgtccaaagtgcgtgttgttattagagtaaaactttattttcgagagagcacatgaaagttttcttatgaagaagaataattgctggtttcaaattaggtgggaatataaacgcaaaatgtgatttaatttagcgtatctaaatctaattccagaaatttaaatgaacaacaattgacagttttgggcacaaagtagaataaattttactattacaaactaagttgtaataaaataaaaaaagtagtaataaataattaaatcaacaaataggaggtccaaatgttataagctaatcgaatcccaaaaactacttgcaaaatacaatgaaaaatatttgcatgaagtgtcaaatttaataaacaatcgactgcttcctccgaactcagaaaatgcatgcgtcgaggacgcaacaggccaacatggtcgcaagactgcatttaacaaaaaaaaaaacaataacttatcaaacgtgcggtcccggttacgttgagccacaataacaaattgtcctaaaattttccaaaggattggaaaaaaagaaaagaaaaaagagagactaaccagcctttcaagaatccatcagcagcttcacctttagactttgtctcgacaggagccaccgtagcatgagtcgtgtcgttcgttgggtaaccgagcggtggcggtgccacgtatggaccggtagacactggcggcgtaggataagctcctaattatacatatttgacattagttttgttaccataaaactctagaaatatgatgtatgacgagattgatgaacgatgatacatgatcatgatgcttaatttgtagggactcaaaaaacaaacaaacctgcatattggttttgactgtattggctcatattcgaacagattatgatttttctttgaaaatgtagatgaaaatggtatgtagatgtgtatgatatatggattgatatttgcaaacgaagatatatagtcatgtaagggaagaaccaaagaaggtcggttttagtagaaccgcgtgagcgcagataacagtcattgttagtctccagaaatttattattccaacgactaaagaaaacggcaaagaaccattatttttaaatgttataagaataactagatgatgccagtggcggacccagccaagaaatttagtaggtgcaaaatgtaactagatgagaatcgaacctgctatcttcagcatttagtaggggcagtctctaccattttgctactttaactataatgtataagctaaaacctttaattctttatatattactggtgacaactgtccccacaaactataccgtgggtccgcccctggatgatgcaaagaataatgttaatttttaatattttaggtataatatttgacgtttctttatagaccaattataaatacgacttctcgtgactcagtcgcatatatatatatatatatatatatatatatatatatatatatatatatatatatatcgcgcccaaaaaaaagaagacgatacaagttggctctttccttgtgatgtattttgctccacaactttgtgattaagaaagtcccagtgagtttgacgaaaaagaaaaagcaaagtctcattgttaattaatggcatatatacttactagatagtttagaagctctatgcgtaatccaaatatgcagcttaagattatactattggagaagtttattactcaataaactaaatcagctatattttgctatatataccctctagccttttgtccatttgaagagcttaatatgaaaaatgaccaattttaccatagatttcctatggcgagtagtcctctcccgtaccataggaactacggcacgtcttaacgcaaaaggaagtaaatagactttgccaaagatgtttccttttttaagaaattataccatcttcacttgtctcttttccatcatgatttggagactttcaactattcttttaacgatcatataatctttttctgatggttgtttgcaatctcacgcatcaatcttttcaatatttacaatctcatgccaatagttttcattctttataactttggcctaataatgttactggttttcgagtccaagctgacgtaacggaaattcaaatttaagcatggtttagatgtgtaagagaaaaaacgatttatttataagaaggtaaaaattacacaatacaaaagaaagagtaataaataaatgaattaagaaatattagaagttccaaatgtcatacaaatcccaaaatataatttgggtaaagcaaaatacaatgataaataatttgcatgaaacatcaaataaacaatcgaatttctcaaattcagaagcaggcgtcgaggacacaacagcaacacatggccgcaagactgcatttagaaaattaaagcaaagaaaattaatctatatttcaacacacaataaccgatccggtttgatagtaaaaagaagactagaatccatcacccttggactacacctctacgtgcggccccggttataatagaaattaaacaaaaagtagtaaaaagaagactaaccagcctttcaagaatccatcacccttggactttgtctccaccggagccaccgtggcatgactgatgtcgctcgtcgggtaaccgagcggtggcggtgtcatataagggccggtagacactggcggcgtaggataagctcctaattacacatatatgatttggcgcccataagttttattaccataagactttagaaatacatgatcattatgacgagattgacaacatatgatgcttaatttgtaagaacaacaaacctgaagattggttttggctgtattggctcatcttcgaacagattatgatttgtttttgaaaagtgtttaatgaaaatcgtatgtagaggtgtagattaatatgaagtgaagatagagatatatgtatatataggtaagggaagcaaaaaggaggtcggtttagtagaaccgcgtgagggcaccattaattgctaagtctccatatatttattccaacgacgaacgaaaactgctacgaagcttccttttttttgttatgtaactcaaattttaagaataagtaaatgactcacacatgcaaggaataatatttatttcaatatttattgagatatgctaatatattttcaaacagaggaagtatatatttacttagttgtttatgtatatttgcctaaatcttataaaggctaattaaataaaacactgcattagacagcctttagagctcaagatcaatttaacaaaacgcagaaaccttaatacgcctctctctggtttctgacagaggatttaaatattttaaaccaaaaaatataatataacaatgatatgaagatatgccttttttattgtttttgttaacctttctaatgcgaaatattttacttttaacaacattagaatatgcaccatgaatgaaatgataaattcagcatgtctttatttgagttatatgttattcctttctttgttaataaagagtttcttttctttctcaaagcaaaagtttagtgctttctctacgggaatatctacatgttaattaagaaaaagagagaatattacaactaaacctcacaatgctgacaaaatagtaaacaacttaacaacgtaaaacaaaatatatgttattttgagaatagtttcatttagagattcaactaaccattttcctttctgtaagaattcacgaaaaaatattaaatccgaaaactttatcttctagaggccacatggaatttttccagttaaggaaattgagtattggtttcatatcaggtgagaatgtgaacgcaagttgtgatttaattagtgtatacctaataatatagaatatcaacgttagagaagtttggttgtttgtttggttaaccgaccaatgtagttctccatttactaaacgtaatttattttcgtcacgtataaccacacctagaaaaagaaaaaagaagatataacgcgctatgcaaaagatcatctacgtcaacattctcaatgcaaaagtttgaccaatggattacgtcaaatctgaaaacgttacgtctatagaaaaaatatttgggtcacattaactcaaaacaaacttctagtctaaagttaaaacaaatataaatattagggtcgtttctgtaacatttattatatcggggatcggataagcctgactgcttcagggtttaagggttactctcactcacacttccgctggtaagaaattcgatttcgatgcgtataatctgtcttccgcttttttttttggttttgaaatcgacaaccttttttttgcttgttgggttaaattcgtatatcatcaattttgcgatgagttttcacttttccaatcgaaatagcaaatgggcattagctaatttcctgaattgtgagtttttgtgttacgctgtgtcattgattcatataagctattgcaaagagggtaaatgataaagccttcagctttacaatataattcacttttactcactagagttaagaaattcaccttctttctctgtttcaggagttacaagactttaacacatcacaatgttttcgatatgtgttatttaaagttcattgtggatctcaggtttgacaagattggataaaagcagccatggcaagtctgataatgactacaccattcccaggttctgtcactacatgtaagaagacaaataacctgtcagttcaaagagcctttagggtgacttgtatgcagacagagaaaccattagaggagctatacaatgttaaagtggaacggaaagtttcacagaaacggttggaggaacttggggtttcgagatggtcagtttggaagacagggaaatgcaaattgccatgggattggcaggtggatcagttggtttacattgaacaaggagaggttcgagttgttcccgaaggaagcaagaggtatatgcagtttttagctggagatcttgttcggtatccgaaatggttggaagctgatcttttctttaacgctccttatattgagcggtattgtttcaaggcctatggtgatgattgatccaactttgacttttgagtttttagtagagccaagaaactttacacttgttgtgtgttgttgtagcctgatggatctttttgtgataatataagaaaacaagttctctctcctttgttctgcattttcaatgctaatcataagtaaacataggcagcatcagagagagataaaaaaaaatcaaacataaagaaagaaactcaaatcaaaacatcatatcatgggtctcacaatttggacaaaaccccactatttcatcaactgaacaaaaaaaagaaagaaaaccaagccagatttgcctgaaaactaaatccgttttacttgtggcttaagcaataagcagagttatgattaggaagaactagagctgctctctcctgaacagccttggccagagtggctagaatctattgccggaggaatgggtaacggtacctgaccagattcacctcaagtagaagcaccatcgccgccactgccagattctcctgaagtagagccgttgctggaatttttaggggtgagagcaaaacagagtttacctgttccagatcggaaagaccagagaggaaagacgtctttttccttaaacgaattcgacttgttagcatcaagcacatcgttccaacctttaacaaagacataattccagtttcccctcatcttccacttcctcaactcaagcgcatgcttattcatccgaggtccaccaaattcacaggcacaccatcgtcacgaatcttcatggcattttcatgtatgattcttgtcacgtcctctgtcaactcctgcatattaacccgccctgagtaaaccctaggttcctcctttttcgatttgtctttcttagtctcgtactctaacgacatgacgggcggatacaacagtttaaagcttttgtcttcgttagtaccgtactctttgtgcacatccgatagacgtcgtctcgaaatttgttccaccagaaaaaggttagctttgtagtcaaggaacgaaggtatagatgagaattggaaaatatagaagctagggttggttattatatagcaacaattcaggttttccttttcttcataggaaattgattttattttgtgattaaattaataagagtcggtgagattacaatttttacactcctgggctttaaattaagccaccaaatccatagtaatttgttattcttaaataacgaaactacccttatccaagaaactgtatagcttatgttttcgttactcaaaaaatttcatatgtaaagaaatacttgttctgtttcttatttttccataataaaacgaagtcatgaatacgttgttttgatatggaagcaactagtttaatagtttcgacgcttctgttataagatcataatttattcatcaaagaaaaacaaaagaaatccagacacaaataaagagtccaggagtaatttgcttaagttgttgttatagcacatttcttcctcattgtccagaaggcagtatagtatcggttctgcaaaacacacaacatcacatatttatccacctatccgatatcaaccacccgaatatagaaacagataatgaaaaatcatagggacatgaaaaagctaacctgcatcatagcccggggatttgtagtgtaagttgtttcaattgttctttctttctgcaaatgttacggacaagtactgagtgtggaagaacatgaaatgttttatgatcaacaagaaaatgtcatttttatatcgagtagttacctcgatcacaaacccaaaatgtgaagcaaccctctttacatcctccaaacttagctcgatagacatttcctaaggagaaacaagaaaattattattgtgataccaaagttatggtgagattgtgggacaactccaatgcttacattttcatggccatatgtgtccgcaaaatgatacaacagaggtcctaaatttatccaaacctgatggaaaattaattaagatatgtcaggagcaaagaaaacatcaaagaagaaagaaaaaggtcaacggtgaaggaaagagtgtgacagggtaattactcctccatcttttaggatcttggatatggtttgaatgtactcgatgacattatgagcagtgtcgatgaaaaagcaagtaacaactgcatcccacattcctgaaattaagaattaacggttacaattaaacaaatgaatggtgtattgcttaaacaaacaagcaagtagccaccgtttcttacctgcatgacttgattcattgtatacttcaacaaaatcaccaccacacatagagaaaccttctgttattcctgcactgctcacaaaatgttaacctttttagtaaagtgacgtttaaatgattgtagctacacgaaatcaccaatacaagttgcctaatccctttcaattgagttcccttatgtttcacaaaaaaaaacagatgagcctttatacctaaaactaccaacacattccaaaaaccataggccagttctactgttgttcgataaggcataccttgcaggatgaatatcaggaatcgcaatagggcgtagctgatcattgtccgagagcgaattgcagttgctgtgtatccaggggtatattgtccactcaccagggacttgtgtactgatgaaaacaaaaaccaagctgagcaaaactcaaaactggaccaaatgtaagaaactacctcaacttaatttagagatacatcagagaagaaagtaaattgtggactctccaagagcaatttagaaaaacagtttgaaatttagaggttggctgatgtgaaagtaaaagatgtgaattactgaattgtggataaactgatttctattttctgaaacaacatgggtgaccaaatatctcaacctagaaaaggaggacagagaggctctttgaggcggacacgtaaggaatataaaaagataatgtattcaagagaataagaaattcttactaattcagaataaaacttgagcatatcatcatgtagtatgaaaattcatttccttggcttatgaaacctgctccagtgcacataattgtcatataccttattatcataaagtatacaataaaaattacttccgcattgcatacctagacaagaaatttcaagggccagacgtccaagtccagcaccagggactaaacaggcaggaggggtgctgcatatcatatagtcaactttgtaaggagagtgaatgcagcaggtactaatcaaatactagtcgtctggtactaagaaggagctaaaaccattatccgattttctgtttctctcttgttaagtctctataaacccaaaagtcaaaaacaaataggagtaacacggcgtacctctccttcaaacggtcaggaaacaaggaatcaagctcttcaaggataggcttgtagcattgatctcgttctctctgaccctacaagtaaaaagaatataccactaaaactttggttgtgatttaagattaaagaaaggatttccacacatcattgtcagaagaaaatgacaaacaaaaatatggctacctctgctgcccagtctcgaacaatattccttataatacaacgaacctgtgttagaatacaacaaaatcatgaacattttaaagtatagattggtgagaaatacacacaacatcgcaacaaatatatgcaattgtactggtgtgtgtgtcacctctatcatgtgcatatgcatacgtgtaagaaggtgcacttaagctcaacaggatttacctccccatgcaaagctacatgagcaaaccaaccctcataacttaccaaactgcctaatggaactaatagagattgagaataagttctaacatgacacataatgatctttgtctcacgctacaagagctcttatacaattatgattacctaggaggctaggactgaggaaaatgaatatcaccagccatagtaaatttgaaaaaccataccttatctacatcaaccagaggaacatgtgtctgtaacgatgaatccaaccaatcatgggatgaaaatgatacctaagaaagaaaagaggaacattagaattagaaaaatcacatgaattatgacaattttatagtcataaatgaagtataatgcaaaaatatatacaacaagcctatgcttgacagttgaatgctttcttaatatagactaacagttaaaattcatttgatctagaatgccaggaaatactcatatgatcccaccaaagatcttaactgatacaataactaaagaatctgcgcaaagctaacatagtcaaaaacgttttctgggcggaactgaggtataagagtatatgagttggcattacactgccatggtcatgatttaactggccttcatgacaatcacatgtcttatcgttgattcttgtgtctgcagagtcatccttgggagaatgatcatgagcttctttcctctgaagctcctgtatttatacaaataaattaaagattttaaatgacaaggataaagttccaatgtcttgatctgacctcgatagacactcctgttattgggtcacgaatgtgtttgctttcttccttatatgtacaactattggtcaaggccggctgacaagaagagtcgtgcctttcatctagagtgtatctctcatgtggagcgcagtcaagatttgagtcttcacaaccatcaagttcctgactcaagtctataggaggctcaaaagcctgccaagtaattatgaattacatttttacatgacaattgacatgaactgtagattttctagcatttcaagtcaagttacgaatcacataatcaaataagttgaagcaaatgaaacaccaagggaattagaaaaagaaatgtctgcaactgacctgaagcatattaaatatgaaatatgaattcgccgatatacacctgcaacaaacaaaatccaacaacttactaacacttcaacaaacactatgtgcagggtgtctgggacaagtacagacaggatagaaatgagtcaagttcaatcttgcatactatcgagtttagtatgcaagcatgagaaagaagaattataagaagcatggatatcataaaaatgacacccgaacacaaaatttaggcaatcaaatgcaaacctcgaagcaactatgatggaaataaaaaattctgaatatcatccaagtgaatcgcgacatttaataagactacaagatgataagtgaaatatttaactgactaaagatttcaccttcttaatctctgaaacttcatagggtaatggggtaccaatgcctacacaaaggacaaaaattcatcactgaaaccattagttctattatataagcaaacaaagaagattcgacaaaaaatcaacttgacttgaaatcgtttggtaatctcttaactgttacagaacatgctactactattctcaatgctagaaatgaggcaaaaaataaccttgtgtgcaggagacagcttccgatatgatctttcccatcttttcaaatcctcttccgaagcctctgggtaactgtaaacatttccaaaggtcaacgatgcagaaccaataccaaaatgctaaagaaaaagataaaaagtaaaatctagaaactagaattgtgatttgaaattcccaatcagtagaattatctttagaatcagaaaacacagtgcctatgaaatgatgtaaaatccagagaaggatgagtgtttaaaaggactgagaaaagtgagatacttgaggtaagcactgataatgcggcgaagagatttggcttcgagagcttcttcgagcttcttctgacggcgtattttctcctcctcttcattatccacgagttccctcgaactctctatcctttcgctttccgttgtcataattgccggtgccgtctccgtcatctctgacggcgaaaccatggtggtggctcttcggttttggagttgatttcatcggaaaggttattagtaacaagaaacgagtctttttcaagttgggcctcatattatttaatgggccttagttagcctatttgcgtagtagtgccgagaaaataataaaattttagctttgtgcccacaggccaaaggttttgtttagctttgagtgttggttacttggttttcaaacatcaaccgaaaaacacagtttcattattttgcaacaacaaaagaaatagtatgtgttttagattggacccgttaattccttaaaaacaaatgcaacagaataaaacatatatagttttgaggaatatttggttaagttgttgttatagcacacttcttcctcattgtccagaagacaggatagtatcggttctgcaacagacacacacaacatcatgcacaaattaaacccatctctggatccaaaagtcaaccacaaatccaaagacatggaaaaaaatctgaccttcatcatagaccgggggtttgtagagtacgttgtttctattgttttttctttctgcaaatattgttaggacaaccactcatataagtgaggaagaacatgcatcatgagatgttttatttctgacaggcaaatgtcattgtcattatattgtgtagatttacctccatctcaaacccataatgtgaagcaactctctttacatcctccaaacttagctcaatcgacatttcctaaggagaaacaagtaagatatattattgttatatcaaatttatttatctagcgagagattgtgtgacaattccaatgcttacattttcaaggccctgctcgtctgcaaagtgatacaacagaggtcctagatttatcaaaacctgatggataaattcattaatttagataggcgagtgatgaaatatcaaagacgttggaaaggagggtacgtataggaaattacgtactcctccatcctttaaaatcttggatatggtttcgatgtactcgatgatgttatgagccgtgtcaatgaaaaagcaagtcacaactgcatcccacattcctgaaactcagtgatgagtggtgtatttggtataaaacatacacatattggcttaaacaaaagcaagtagtcaccatttcttacctgcttgacttgattcattgaatacttcaacaaaatcaccacgacacattgagaaactttctgttactcctgcactgctctcagagagtgtttacattaaactttttagtaaattgaaataaatgattgtagtagctccatgaaatccccaatacaagttgcttagtccctttatccttaaagctatcaaaaatttccaaaccataggcaaagtactctctctgataaggcataccttgcaggatgaatatcaggaatagaaatagggcgtagttgatcatcatccgagagtgaattgcagttagtgtgtatccaggggtatattgtccactcaccaggcaattgtgtacttatgaaaaagaaaaaagaaaaaaagtagagcaaaactcaaaactggaacagaatcaagaaattaactcaatcaaatttagagactctccaaaagcaacttagaaacacacttataagtttgttgctggctgatgttaaaaatgtataagagaaaagtaagaaactcttactaattaagaataaaacttgagcataacatcatgtagtatgaaacttcattgccttggcttctgaaacctgttccaatgtacaagagttgttatattaattcctcgctatcatcaaagctacaaaaaaaaaacaaaaaaaaaaagtttgcttctccactgcatgcctagacaagaaatttcaagggccagccgcccaagtccagcaccagggactaaacaggctggacgagtgctgcaaatcatatacgttaactttgtaagcagagtttatggattagacagcaaagccaccaaatttagatattgaatggtaaaacaaaaatactcagaatgcattgatgggaggtcagaaactcaaaagtcagaaagtgtacctctccttgtgacgatcaggaaacaaggaatcaagctcttcaaggataggcttgtagcattcatctcgttctctctgaccctgtaagtcaaaagattgtatataccactaaagttgtgatcatgatattagagaaaggatctcatccttgccatcatgacaaacaaaaatatgattacctctgctccccagtctcgaactatattccttattacccaacgaacctgtgttagaatacaacaaaaaccatgcatgcacatttctaagtaatagattggtgagcaatacacacaacatccaacatatatatatatatatatatatacaattgtactggtgtgcgtgtcacctctcacctctaacatgtttcatgtacattttgagaattgaggatatattctttttatctttgttcacactaaaatagctctacaacaattatgagttgctaggatgaaaaaaaactaatataatcaaccatagtaaaagtgaaaaagcataccttatttacatcaaccagaggaacatgcgcctgtaacgaagaatccaaccaatcatgagatgaaaatggtacctaagaaagaaaagagagcaacattagaattagaattacactatatgaggtataaaagtatatgagttggcatgattacactgccatggtcatgatttaagtggcctccatcaaattcacatgtcttgttattgagtcttatctctgcattcttgagggaatgatcatgatgatgttcctccctttggagctcctgcatttatacatataaattaaagatttcaaaatgaaaaggataaatttccaagtcttgatctgacctccatagacagtgctcctgttattggctcgcgcatgtgtttactcaagtctatagggggctcaaaagcctgccaaataattacaggacatggttcaaattacgaattacaaatcaaataaatagcatgaagcaattgaaacgcaaatggaatttgaagaagatatgtttccaactgacctgaagcatattatatatgaaatgtgaattcatcaatatacacctgcaacaacaaattaaagtccaacaacttactcatatttcaaataagaccatgcttaggatgaaaatgtccacaccaataacttgcttgttacacgtttagactgcccctgacctcaatttctctagggcatatcattattgtgacaaaaaaataatatatatccaagtacaaatgaagaagtaataatcatatctgaaaagcaactataatggaaaaatataaaatatgaatattattactctgtgacgtttatctaattgtacaagataatatatagtgattagtgaagtatctactgattatagatttcaccttcttaatctctgcaacttcatagggaaatgggttaccaatgcctggacaaggaaaaaaaaaaggcaaggctgaagatagttagttctgtctattataacaaagaatcaacttgacttgaatcatttgggtgatctcctaacggctattattgaatattgaatattctaaaatatgctgcagcaataaaccattaacataatattggtaaacacaacaaataacaaaattaccttgtgcgcaggagacagcttctgatatgatctttcgcattttttcagattttcttccgcagccttgggataactgtaagaatttccaagcacaaggaaagtaactatttaacctaaaagcgaagaaatatcccacatccaaaatatgagaagggacttgagtcgtatataaaggacatgggccaattcaataattgccaattgctttttgagttcaaagcacaacaaacttaaatgaccaaaacaaactcaactaacgaatcaccctacaaagatacacaatccaaccaagtaacatggttaaagagcttgagaaaacttaagtctaagatttaactcggtcaagtcttcttgaatccgccaagatagtgctatttatgagtaaaaacgaagaaaaaacaggaacctacttgagataagcactgatgattccgggaagacatttagcttcaagagcttcttcttcaggattcttcttgcggcttattttctcctcatctacttccctcgaattccctatccgttcagtttcagttgccatggctgttacaaattccggagccttctccgtcgccatcatctctgacgatgaaatcattatggttcctcgtatacacgaagactaaaaagacttttctgttatttaaggatatattttgacgtaagattatttctgaaaggtacgttttattatttctcctactatgaaaatggggtaaagtttggcctactaaggaacatgaggtccaaatttgaaaatataacaatagcaatttgaaaatgttatattactaacatagatataaatgttatattatttctcctacaatgaaaatggagtaagttaggaacgttttaaatgttgtaatgccagacattcagaatttataaataccatagatataaaactgtgaattacttcctacagtagaaaaaaaacttcggtaggatttagaaatacagcaagatataaatcgcaagggattcgtttatcaaatacagtaaaacctttataaattaataatgttgagactgcaaaattttattaatttatagatgttttaatttatcgataaattaatatttattaatttatacagagattttcttaatttagtaacttttcaaaaatttctataagatttttttcattatagaaaatatctttcaaaaatcaattacaagtaaataataatatcatgtttagaaaacaacatcaaaagtttttgataaagtaaaatactataactaaattttaaataagaataaatacaagttttaagcaaaaaaatattagaattatatttcaaaacaatttcttacatataatgtatatataattgatatatttataaaattattaatttatgatattgatgagaccatatatttacataggacttttcaaaaagttattatcttattaatttatcgatttatattattttttataatggtcccaattcgggagtgaaagaatttattaatttatagagatttaactgtaatatgtatcatggtggttggagataaaattataaacagcatatctctaataaaaaactatatttagtctgttcgtttagtggccgcaggcggcagcggctgcggttgcggcagcggcaacggtaacactgccgcaggttgttgttcgtttcgtcgccgccaacgttgccgcagccgctgtcgcaaccgcaggttttgtgttcgtttcgatgccgccatcgttgccaccgacgctgccgcatgtttggtgatcttgacagaagaaacgaagaagagaattgggatttagggtttgtttgttgaagaagagaatcgcttggtttgtttgtgaattttcaaaaataataaggatatttttgtcatttaggatatataacgcaactctttcatctttgacgctaaatttaaatggcgtctaaaatttttaaccgcagaaaactgcgtttgacgctgcgttttgccgcaagtagttgcggcaaccaaacaaacacaactagttgcgtctaccgcagccgcaggtacccgcggcgacgaaacgaacagactaattataaaatcccaatcaaactttaaaaaaatcagttgaataaaaatgtacacatattgaaatcataatcatcatacataatattatctgattgcgtattcacatttggtgtccacatgggatgaatattgtccaccaccactattatttatattcacatatgcattatcaacattttaacgccacctgtacaatcccaaccactagacgttaaaattatccaacggccacgatccgcccactcgatcacgtcacgcaccgacggctgctattgaagccataccctccagctcactcttgctccgtctgatcctctcaccaccaacgtcaaatccgcctgtcgccgtcgccgtagcccaaatctctggcaccgccgtagctatctcagtaaccgtctccaccgcataatccgcatctttcgtcttttctgctcttcccacctttttgtaaccaaatttttaaaacttgaaactaacacatacaaatgtcgcaaaatagggaattaataaatgtgaaatgtaacaaaaatttaccaggattgtgcgaagcccgacagatttacccgcggtaatattgtggatattatcatccaaaaatacctatttacaaaaacagtttgcttattgtaatgatgatacaatagttttatcataagaaataattaaataaataagaatattactgttcggcgaggatcaacgttggctacacgaatgcaaatatccattgcggtcaacgaaggcttgagaacaaccgggtattcatcgggtcgggttgttgacccgaataaatttgggttcattgtctcaaaacaaatcatctcttcgaaacaatcttctaaaccaagtttcttgaggaccttcaccgcatgattcttgtccgaattcgtaaatatctggacccaagaaaaaacaaatgatcatttattagtgttggctgtatggacccaagaaaaattcatgccacaataaataaaagattaaacttacaatttttctctgtttgattttgttgagaaggttacgtagcttgttgtttggttcgatcgacccatacggtaaccttccgtgcacgaaactacaaaacagattttgcaagaaaaaaaagcttaagaacaaaaatcgctttcctgagatcaaaatatttatatagttgttgaagatgattgattattacctgtgatattcatcaggatgaacatcatgacctaacgcctacaatttataagaaagaaataaataaattagaaagcaatgatatataatgaactagtaattctttagaaaatggagaagtgaaattaccctaagaccagcgagagtacttccataagtcttgaagagttcaactcttaagcttgaagctttactttctgagaatccaaatttctccactagaaaatctgcccagataataatatcattcacccaaatgtcttaagaaaaatataagtaattaagcactaattaagattgtttttgtttagttaccgtcaatattcttcttgacagctggcgctattccagtttttagagggtataatgtgtcatccaaatctgatcacaattagagaaacaaaccaaagacaattagaacaactttagtaaacacattttaccaaatttgatatcacgtatttgtataaatgttttaccgaaaatgaggcagttgatcggagagaaatccattacaagagaacaagtaagtaagaaaatatataatttgtttagaatattgagaaattggaggatttatatagcaaacaacaataagaggcgtgaagaaagggagatgtttgaaggtatttataggaagacgagtcttttctttttagtgtttgtttttctctattttttaataatggatactgactgctgactcatggttcaaatccctttcgtctattttatctggttatacattttctttgaacatccattacattataaaatatgatttgatatttactcggatcatattctatcctcatttgtgtttcaaacttgcaatggccgctttctatcttaattaaacaatgttaaaccactttttaattaacctaacgtgttaagtctctaaaaatgttctaattaacttgtattaaaacgctatgaaatattacttattcgatgtcttcagcgagcatggaacttcgtccatgttttttttttttttttttttaatgttaaacttaaacttcgtccatggttgatagtaaatgttactataacgttccaatattttaacttaatagaatttagtttttcaatgccatcacaagaaaagttacagaaaaattaggcaacgcgtcgctatagtttgtactaaacatcgatgaagtatcatatgaaatgtccatcattaggttttaacttttagcttttagatgttttcttaacaacatcgcctttatgtgaaattcaaatatgatgtcacgatcgactcactagcctaattaagtttgtgcacacaaaacacgtgtgtttcacacaaaaaataatatcaattcctagtaggctactacgcgttgacagaatatgcttcgttcagttgtacgtgtttcacatgctacaccagattattggagaatgattagcaaaaatctcatgtactactgattagcattacaaattcctaaaaaccacgaaaaaaagaagaaaaaaatgccatgaatctatctaaccagcagaaattaggaatcgtgttcttttcacacataagaaatacgatattgctagtgataatgttctgatttttttaaataaaatagtatacttattaattgatagttgttgagttgtctgtggacctctcccaaacatcagcacttccccatcaaaagatgtcaccaatatgttgcgttattggttggacattttctacaacttcttcatcttctatcgtgaaagattccaacatgatactcttattattttctgctttcattattcatttattaaaatttcaattatcatatacttatttgaataaccattggagccagagaagaatgacaattaatatttctagtccaaatcatcacatttgttctcttcatctggagtctagcaacaacaactttcatcatcgtatgtaactagataagactcacctaaataagttgtaaaaaatatataaaatttttaatagaatattttaagttctaataataatttatattttttttatctaaatattttaaaaccaattctaattttacaaattggattctgcaatacaatctaactatttatttcatgtaactttgagtattagtaacttgtcttaaacatatttgagtagtgtagtacaaaacctgagacaacatatttgaggcaaattttccttgaattgcaaagaaattacgtcgaaatttttctgaaattcaggacgaaattcctttccccctatgcgtggtcagagaagtagtcacttgttttccagagattcttagaaaattcttttctccattcaattattggggcttatgtcgtgttcttcctttgcaacttccgtgtttaggcaccgaagtttccaggaaatataccaaaaagtttcttttgtctgaatattaattattaacgacgataggatgtaggtaatttcaattccaaccaaaaaaaaaaaaaagacatacagattttgctgtcccagaacaagttccttcattgcgtcttccagattcttcttttctttcaaacaagaatcgatcaaactccttttgtttctaagaaagaactcgagatcggatggcaatagcttcttcttctccttcttcttcttctaatgtatcagtgatcccaacgggacctcaagtgttcatcagttttaggggaaaagagctacgcaaaggcttcatcagttttcttgtgcctgccttgaagaaaaaaaacatcaacgtctttatagatgagcacgaggtgaggggaaaagacctaatcagcctgtttaggaggataggtgagtcaaaaatcgcgttggtaatcttctctgagggatacaccgagtcaaaatggtgtttggacgagctggtacagatcaagaaatgcgttgatcaaaagaaaatcatagcgattcccatcttctacaagcttgatcccgcagtggtgaagggtcttaaaggaaaattcggcgataaattcagggatctgattgagagatatcatcatgaaccagaaagataccagaaatggacggaagctttgacttctgtttcccgaacgtttgcattgtgcttaccagaacacaggttacgatttttcaatcataaaaattgtctgtttcttgtagcacaagataccaagtaagtgtaaaggaaagctactaaacccattaatcttcttttcttttacacatcaaagtgataaatctgagaaggatttcataaggtcaatcatcaaggaagttaagaaagccctgtcaaatatctccagagaaagaaatggagatagagaagaaattgacgactgtttcgtggtttctgaaaggaaactcactaccgatatgtacgatacaccagagtaagagctttttttcatatagttaaaacattaattagaccatttctcatactacagtttcattcactcgtatatgatatgaataatataagggtaacaaaataatcaaatgatcgtccgtataacatatgttttacatgtaatagagtttcgacgtcgacgatgaggaaggtctcctccaacaatggagtcggagtcggtacgtttaagtcacagaaaccaaatttcgacgatgaagatgacgacggagactcccttttaaaagcgttggttgcgaagctcgtcgctagtacaacttccattgtagctgcttacgcagagcttcagagggcgcatagcgacgctatacaagcggcggaaacggtggtagttgatgttaaaactttatcggagcttatacggagtagtaacggaggaggtggtggaagtggcagtggaagcggtagctcccttgagaatcagccgaggagatcaaaggtgaggaagcaagtgtgggctgaagttctcggcatctcatccgactccaccatcatattagagtgtatatagttggtttagttatggtttagattcgttagtattttgatttagtttacttgtatttaagtttaattatatatcatttttacacttaactagatattgacccgcgatacaccacagattgatattttcattacaaggtgtatcatatattaaaaaaacaatagcctatatattaagggtaacaaaataatcaaatgatcgtccgtataacatatgttttacatgtaatagagtttcgacgtcgacgatgaggaaggtctcctccaacaatggagtcggagtcggtacgtttaagtcacagaatccaaatttcgacgatgaagatgacgacggagactgcctttttaaagcggtggttgcgaagatcttcgctagtacaacttccattaaagctgcttacgcagagcttcagagggctcaaagtccgtacgatagcgacgctatacaagcggcggatacggtggtagttaatgaactaaaaactttatcggagcttaaacggagttttatgaggaaggaattgaatctttcaccaaaagttgcgattatgttagctgagatccatgaacagcagagtttgatgaggacttatgaaatcgcgatgaagagacttgaatttgaagttacggagaagaaagtgaagatcgatgagttgaagatgaatcttgaagagaatttggtgatgaataaatcgttggagaagaaactcacagctacttgactcatcgcttgaattgaaaattattgtattttcactaacttgttggactttagatatgagccgagcttgcttttaagttgacattgaacgaatttttgtagaaattttgcaaaataactattcaacgtccgtgaccaagaaatttaaaaagttaagtgagacaaccctattaattatcatgctaatattgttattttatacaccaaaaaaccagcattgttgccttgttggccacataaacatcaaccaagaatataaacacattatgcaattttttgaaagtaaaagtctccaacaatattaaaaaccaaagctaaacaaatgatcatttaccatactgtatataatttggaactctagcgagaagcacacttgatttcatggctttccgagagcctatacttcataatgactatgccacatatatagcgcaattcttgattaaatcgaatgactatggtatattggtataaatttaggtttgagcctttatgaccagatgaacattctagatacttcttagcacaatcatgtacatataaatcgataaactggaaattgttgagagctcacgtcttaaagcatatgttggccaaaaacgccaatcacgtaagatgcataatttatgcatctcttaacgttgattactttgaaatctcatcttgtgatgatgaaatttaatcccttaaggcgaagagaaataagcacaatgaccaagaaaatcctcttcttaaacttctttgacgattggagtttctgatgctaattctttgatattctgtatatgcattggccaattttcatatatgtaattaataaacacactgattgatatactaattcattgaaaaatttagaggaaaagaactaattgaaacaaatattataatttatgatctagagttgggccagtactattctacaggcccatatgatttgttaaaattaatatatatatacaagtttacttcaaatgggcccattttttagagaaaaatagtaaagtaaattattttcttgggtcggcaaattaatttagcgagaaaaaaaaaggaactccctcctcttttctctggcaaactctagaagaccaaggaagcacagtaacaatctctctctcgcaccttcttaaaagctgctctatttcttcgcttccctcttctcttcactcacaaaacattttgttctaatcccgcaactgctaaaaacaaacccttttgtcaaaaatctctcctttcggtggtgacaggtttgttctttccgagtcctctctttttgaataatactttgtttggttttagctcagttcttgtacttattgaaattgcaattgttagattttctgattactagtctaatccttaatttgatttcaagtttatttgtcaattttgaatctttatctgggtggaatcgtacgactgtaaaatcctgataaaatcctacaagacactttgaaattagtttcagtttgtggtagaattggttcttaatttgttttgaatgttgagtgatgaactcaaggataaatctttgattgtgttgataaatcttgaatcctgaatcagaaatctatggcaggaaatggcagaagcagcatacacagtagcatcagacagtgaaaacactggagaggagaaatcatcatcatctccttcattacccgaaatcgcccttggtatcgacattggtacttctcaatgcagtatagctgtttggaacggttctcaagttcacatcttgaggaacacaagaaaccagaagctcatcaaatcatttgtcactttcaaagatgaagttcctgctggtggtgttagcaaccagctcgcacatgagcaggaaatgctaaccggagccgctatcttcaacatgaagcggctcgttggtcgtgtagacactgatcctgtggttcacgctagcaagaaccttcctttcttggttcaaactcttgatattggagttagaccgtttattgcagctttggtgaacaatgcttggagatcaacaacaccagaggaagttttagctatatttctggtggagttacgtctgatggctgaagctcagttgaaacgtcctgtgagaaatgtagtgcttacggttccggtttcgttctctaggttccagctcacacggttcgaaagagcttgcgctatggctggacttcatgttcttcgtttgatgccggaaccaactgctattgcgttgctttatgcgcaacagcagcagatgactacccatgataacatgggaagcggaagcgagaggcttgcggttatattcaatatgggagctggttactgcgatgttgcggttactgctactgctggtggtgtttcacagataaaagctttagctggtagccccattgggggtgaagacattttgcagaacacaattcgccatatcgctccacctaatgaagaagcttcggggttgcttcgtgtagcggcacaggacgcgattcacaggctaacggatcaagaaaatgtccaaattgaagtggatttgggaaatggtaacaagatatccaaggttcttgataggttagagtttgaggaagtgaaccagaaggtatttgaggaatgtgagagacttgttgtgcagtgcctgcgagatgcgagagtcaatggtggtgatatcgatgatttgataatggttggagggtgttcgtacatcccgaaagtaagaactattatcaagaacgtatgcaagaaggatgagatatacaaaggcgtgaatcctttagaagctgcggttagaggagctgctttggaaggtgcggtgacttcagggattcatgatccttttgggagcttagatctgttaaccatacaagccacacctcttgcagttggagtaagagctaacggaaacaaattcatacccgtgattccgcgtaacacaatggttccagcgcggaaagacctcttcttcacaacggttcaagacaaccagaaggaagctctgatcattatatacgaaggagaaggagagactgttgaagagaatcatcttcttggttatttcaagctcgttgggattccgccagcaccgaaaggtgttccagagatcaatgtgtgtatggacattgatgcatcaaatgctttacgggttttcgcagctgtgttgatgccgggatcttcgagtccagtggttcctgtgattgaggtgaggatgcctacggttgatgatggacatggttggtgtgctcaagctttgaatgtgaaatatggagctactcttgatttgattactcttcagagaaagatgtaagattaaaataaaatggtgttggtgatagattttagattagatgtaagatacgaggatgcttcgtatagaaaagagtttgtaaagtttgtgtgtgttttggggtttgtcgttgaagtggtaaacaatgtttatgtgtgtaatgaagtaataatgctttgcagattgtataataaactagagagtttggactttggacactttcttttgagcttctgatatgttgtgttgcaagtttttaactgtttttgagcttctcattaaaacttggcaaatttggatggtcaacacttttatcgagtaggacattatatggattatattgaatgaattttttcatattgggggattaataggttaaaagaatcaaaattcgctgaaaggaggggtcgaacctccgaccttgaggttaacagccacacgctctaaacctactgagctattccagctggatattttgttttcatttttctacaatttaaaaattaatttgattactttccttaattttcctgaatcaagtgatcacacttttgtttccttttaagggaattgctcaccatgaatcatggccggatcgttttatttgactctaaagaattatggaaatcgcaacaaaatgaatatgaggctcggccgaggcaagatgtggtgatccggtaaaggcatagtagtaaccgaaatattcacggcattagtgtttaggatgttgttgacaattcaataaagcgtataactttaattttgataggaaaggtaagaaatccaaatgcagtgcatgagtatcaaactttttattttgtctcgatagtgatctcatatcttgagattgacccatatttaggtaggtgtggaacttttaagttattggactcaaaagtgattgtataattttgcagaaaataacatgcatggatccatttataagtaaataaataaaaatcgtctaaactcgtaagtcgtaacatgtgatatcacatgatttgtattgactacggcaacttgctaatttcaacgacaaattatttatacactattatagtttttgagtttattagaccattataaaatgtattctcgttatgggatgtaatcacaagtattttgtgatttacgggatatttcggagaaaggcttggctaagaaaatggcaattgcattgaaaaaaatctcaacacttaaatctagctagtaagcaaattatttcttctcggattctttttctgattcgtttaaaacagtgaggtggttgacagataatttcctatctaaatgaccttcaattcgcaccgaaatggtcaaatggacatatgaaactctactgtacgtttgacccaaatttgttctctctctcacacacacgcataaacattgtggcataggttctattgacttatcattatcaaccaagtggttaggcagagttggagacaagcggcagaaaacaaggcaccatttaccaactcgaaaagtataattaagattgctcacgttttgagtcgtttaacttacgataaaatcatagtcagttattacatatacatgacgatttaacaaaacgcacattttctctaattataaatatataacatcatagtcattttttattattttttgtaaattgtaaactcatcatagtcaaatttagttgcaacttttttaccaaaagtaaaaaaaaaaattagttgcaacttcgcccataagcacctttcatgcaataaaagacatgctgatttcattgcaaaaatgagatttagctagttcactaatgaattcaaagtgttaacaaatatgagctatttagccctttatagttgaaatgtataatcttatactaattagattaagttgagtgttttactcgcaattgagcgggtctagaggctagttttaattctttagtgaacactgatcaataagacaaatggcatggtcttactttcacctaaaccaactaacttataatactttgtttaattagacccttattttaaagtattagctacattttttaagtttatttggtcgagtggaccttccaacatccgtctcttaggattctcaattattttgttttgtctcacattgtgttacgtgtaaatcttatggaaagaagcaaaggaaaataatagatttcattatttaattgatgtaacaaacaatattacttcttcacaaaaaaaaaacaatattacagagtctatatattttgtacagaaacaaaacaatacaactatacaagcaaaaagtagcatccttttgttgtcttaacgataatacatatacatccatgaaggcaacattaagaactgaggcaacatacagaaagtaaaaacttctactttttttactttatatattgtagaaacattaactatatatgcctctttattaaagtatggatacatagtaatatttaaaacacgatccatgcatgccttgacataatataagcaactagagagtttatcgatgcctcaagctttgtaccttggtgatattgttgtctactcaaccttatgcttcattgatccaaccaagttccattttaactcttatcataaagttttttggacgtatttagctttgatttatttgttaattcataagttttaacgtttaaaccatttctttaattacttctacctccgaaccaagttattgttattcatatcacattagaaattcacttctagttctaatacttttctttttttttgccaatagtgatgttcaacacaaaaacatgtttttatgtctgtttcactcaatcatggagtggaccagttttgatatcccggtttgctatattgtgcggtttatattaacgaattttgttttttaaaactataaaccatttaaaagaagttcttttcgtcaataaaatatctaactttatattatccaaccaaatatatgaattatctcaaaattcttctatcctttgcatcattcaattattttaataaaacatacaaaatatgaaattgtcagtaataattttttctggtttgcttagttactcttccatgaagacgtacattggaaaaaagaaagttaggttcactgaactaatagtcacgtgttgcattcattgcacgggagttttttttttatcccggcggccatcaccacgtcagcatatccggcgttcttccgacaagagtgagaccaatatgtcggagaaagccctgatgacgaacttgtgtgtgtcggctggatttaaagagagataagtgagtagcagttcatccaagaaatcgtaaccgtcgttcggatcacgactaagttctccggcgtcgatggcggcgtcaatcatctcttgcatggatcgccggaagtcagttaacggatccggtgagtccacgtgttgagttacggcggttcctccgcttataagcctcgtagtagtagtagtcacggaattatcataaaccttctttttcttcttctttgtcgacgtgatagtggcatcatcgtaattatcagagaattctcttgaccggggttctggtgagtcggtgattgcattggaccgaccaggggaagagaagaagaagcgacgggaagcaaaagcggcggatacatcaggagagatatcagattcatatgatgacgtggatgaggaggaggtggcggccggagtggttgtggtggaggaagaaggtaagtcaatgacacgatgggggtggtggtggttgtcattgtggtaaaggaggttgaagttattgagaagaacgatggagggacggttaggttggatgataccgtcgggatcggcggaggacggaggaatacacggcgaagaatagcatttggtgagatttgacgggaagcaaagatggaggcttttccacaagatttttggcatttttaagagagagagagagagaagaattaagagaataaatgtctcgagcaaatggatatgttggcttattttgtaacatatatatacacaaatgtctcattacgtttataaaagggtacttatgtaatttacaaatttctatatactaatgttgccaaaaattttttttttataaatgaataagtgaattactatcaattttctgatttatctcattttcaagaatcgttatgtagctaccgagagtctcaatgttgactatgtgttcaccaatcaccacatgcacttgtgttgcgacttgcaaaacaaagtaatggtacttgttactattgactaaatgcagttattaggatccttaattttcatctatattgatgaaacgtttacaaaacatatattccctaaagggtattgtactttcgagtgaatctgaatatcagatatttacttttttagcgtttttctttcttttggtttgatactttctaattttgtaattattcactttctttctgaaacactgacgtacaaagctgaattcaacatggggaggtctttctttatacgtgaatgatagtatttataaattttggtttattcatataaccttatagtttgtcagagttacaaaaactgcaaaacatgaagaatgagtgtccttgcaattacagaatagagagagctcacgaggaggtaaattcatccaccacctagattggtccactcatcatgacgtaaagccaaaagacgttagttcaagtacgaatacttccctagtgtggtcctggtttttggtccaccggtccgattcacaaggtcaggtcgagttttcactggtccgaccaagcaggtcattcggtcaatatttgttttgttaatcaagtcctaaagatattttagccaccagtgactataactaagtctggctatttttgtacatgtagaatcaagtaataactaataaggagttaaggactaacgatcagttatgacttgctgttgctggtaatttggcgggtgagaatagacaatggatagaagcaagttaaaaatggaaatgaagcatccaatataataagtattttggaagcatgtttttgtgaattatctcattatgatttggttatagagactaatgtgaagtcgtgttggtgaaaggtttgaaacttgttgtgtttcatatattcaatagtttagcgactatttttgcttgtagcctatatattttcagggttatccctcgttactggtaaagatcgtatcggataacactcgaaatgcacagctgagctatcatcgtgccaaggctagggtggaccggtggtaccacttcgcgtagttatccggcaccagaaaaaaaaaaaaagattcgaactcatctttcatatggataaatttatgtgggccacaacagaaaatatagctatcatcatactttgttgttacataagctactcatgattcgtccgccaatattccatcaccaaataagaaccacaaaagcggcgactgatggatcataagattttagattatggtaagttgtagaatgtttgtaatgccttcacaccattatgcctcttgccatgttgggggtatggacaacaacttagccccacaaattgatgccctattttgtttagactggaattttgaaacacatttttctctattttgctatttttggggtcatcagtctacacatggatgttgcaaatgaccaccaattcggttcacttcaggttgggtttaattacgacccgactatgatctagccaaccataatttagcctcgatatctgaggtttaggtctgattcgaccaagctttatagcaatacaagtcaaccggaagttagaaatgatacgtttgatgagttcaatccgggttgaaccgggtgagtttatatgaccaaaacaactcttcacaataaatgaataaaatatctcgagttgtgaatgtatggttgttcttagttgggtctctatcgtcctctctctctattataactatcccaatctcttcggtgttgtaatagagacatgggaactactagacaaggaaaagctcataaattcgatacatccaacattcaaagcacatgacacgaactttgaggcgtaagctgtcacaagttaacatcaaacctagacatatagattttatttcaacaaactgattatttatacaatacttttatttcattctataagtagtgataccacatatttcaggttcaaggctcatgatcgacttgctacctctaatccgtttcctgcaaaatttgacgacagaatctgtaagttgaaacagacaggatcgctgaaagataatcctagaacacatgttccggatcgatagaccaaagtactaaagcatcaatgcatataaatatataatacacaagaactgtaatttgcaaatgcttgtgctgaataagaaaagtagacatatatctgaccaagttataatagttattaagccggcttaagagcaaaacagagattaattaccatcaggatcaaagaagaaaacttgcttgacttttccatcaggaagagacttctgaaaagtttctatccctttctcctacatcataacaaggacgagaaaggatcgattaaataactctgaaagataccaatcatatccataactgtaccatcaaaagctcatgtaaacaagccaaagaaacaataccttgagagaatgaaggaaagagtcgaaatttgggacagagaaacagatatgatgacccattgggagatggctaggatccttaaccgctgaggtagcactgtaaggaccttctggaagatttgttgaagggtttctctggataatatgcattgcaaaagcacctggtaagtttagccacaccacctgtaggtctccaaaatcaggactttcgatctcctcgaacccaaacacctgacaattatacatatataatccattggtttcagaacaaaccacgaagatgaagataacactaacttaatcaaaaggattaaaggcatccaaaagtggacactctcaatagaaactagaaacgagataagtgacaagagaaagagacaaagccacaatagcaacacaaatctctaaataaaaagccaaattacaaaccatagattctaatccagatgggtaatcgactcagtgcgtttgtttttttgggtcgaaattggtagtaacaacacaaacccagaacagagaatacgaagagagataagaaaaagaaaagtgtaagaaattgaaaacgtcgattaggtgtcgttacctctttgtaaaactgggcgaggcgtgtgatgtctgatgattctctggctatatggccaagactcgccatgtttggttccaagcggacaaagctaatcaagaagaacaactcagaaacaaaaatggtcgacaaaaaagagattagtaaaagtacgtggcatcggctccttataacacatctttaatcaaaccataaggttgaaccgatcggtttgactatcagtgaaactaaaaccaactttaaaaaaaagaattattatacgtaattgcagttactccaagaaaaattaatctgttgcttaatctgaatatccgaccaatcagaaatgttcggaccccgaccaaacaatgtatccggtttaaaacatccggtccggtattaaacccttattgctccgtaatctctcacctccaccaattcctcattcttccaatcgcacttcctttaccagatcagacgtcaatttcaactcttcagtgaagagatttctttcaccgaattttctactccgatcgatcaattgaagattgaaatggaagctaattcaggcggaggaggaggagctgaaggcggaagagcggtaaccggaggaggaggaggaggaggagggagcgatgtggaattggtgagcaagacgttgcaagtggagcataagctattctattttgatcttaaggagaatcctcgtggaaggtatctaaagatatcggagaagacgtcggcgacgaggtcaaccatcattgttccttcctccggcatctcttggttccttgatctcttcaactactatgtcaattctgaggaacacgagctttttagcaaagaattgcagcttgattccaaggtttcaactttatcatcactctcttctggcgatcgttgacttttccactctctttaatttctgctgttgttgctttattcaggtgttttacttcgatatcggtgagaacagaagaggacgcttcttgaaggtagaaatttttctgttttacttaatgaatctgaagttttttttctttggtatatgtgaattgaagatttagggagtactagacttatggttaggaatgttcttttcattttggttatgtgactaattatcctgaggtatcagaagttgtaggaatgttctgatgggttttggtgtggtgttaggtgtcagaagcatcggttagtagaaatcgaagtaccattattgttccagctggaagctctcctgatgaaggatgggcagctttcaggaatatattggctgagatacatgaagcatcaggactttttgtgatgccaaatcaggtggtattatcgtctcctttgattgaaaagcctttaactaagttctctggtctcattgtatcttcgttttggaaacagaaaccttctgatggacaggaacacttggttgatgatgttggagctggttttatacctggacatggtagtcagcagccatcttcttcagaacataatgtggatcgaacaattgactcgccaggccaggaagaaaccggaatgactggtgtttctaaagtaatcagagctgaccagaaacggttcttctttgatcttgggaacaataacaggggccatttcttaaggatatctgaggtaatcttggaagaacaatcttttgctggcttatctcttgagagcttgtatttaccatggttttaacattaaagcatttctcaatataggtggcaggttctgacaggtcttccatcattctaccgttatcgggtcttaagcagtttcacgaagtaattggtcactttgtggagatcaccaaagataaaattgaaggtatgacaggtgcaaatgtcaggacagttgatcctcctcagagataagtattgattctcttagaggatggaaattttcaatcctctaaccatttgaatctggcaacttcaagtcgactgcctgatcgcggtgtgcaatagtttcacgtaatatctctcgccccttcacatcttctaaaaataattcagcaggatcatcatttgccttaatagtagataaaacaaactttggagtctgcaactgggaataagctgaaaatcatccaccatgtgtatctctctctctctctctctctctccctccctccctcatttgcttctgttctgttttaactttttttgtttttgttcagtttgggtcattgggtgtatatctgttgacggcttgatgcatttcaattgtaaaagaatattggggtttatatgtttgggctaatgcctgttggaataaaagatgaagtgtaagttctatacatgagttacgaattctttttggttttgtctgaaaatgatttagttctactaccagaggttctaagagcagttgcgaattgtatatactgtcctaagcatgctttggttagacaaaaatttcgatttttaggttaatcgaaaatgcctcaataataaaaaaaaaagaaaaagaaatcaacgttgcgtataaaacaagggagaagataaaaaaacagcgtttgtaaataaaaaacaaaaaccctaaaaaaaggagcaactttgggcacagtccgagagagagaaaaaaataaaaaataatctgtcggtgatttataacctcctctctaataaaccaccacatcctctgaaaccctagcctgaacaactcgccgtcttctcgagaaacatctttcttacttcgcttcattacaaggttcgaatccagctgtctctcttagtatttgtctatgtatctgtcgagtttctctgttttcattgatttatgtaaaatcagaaggttttggtttttgtaagtgattcatttgttttgtgttaaatctattgcagatctgatgaaaccagatcggatcttgctctagatccagatgctccttaacttatttactcgaattcatcatcatcgttatcatcaccatgtcactgtttctaaaagacgattcgattcaaatccgtgaagtatggaacgacaatctcgaatcagagatggctctgattcgagaagtcgtagacgatttcccattcgtagcgatggacacagagttcccaggaatcgtgtgtagaccagtgggaacattcaaaaccaacacagagtaccactacgaaactctcaaaacaaacgtcaacatactcaagatgattcagcttggactcactttctctgatgagaaaggtaacctcccaacttgtggaacagacaacaagtattgcatctggcagttcaatttccgcgaattcgacctcgaatccgatatctacgctaccgattcgatcgagcttcttcgtcaatcaggcatcgatttcgtgaaaaacaacgaattcggtatcgattcgaagcggttcgctgagcttttgatgtcttcagggattgtgttgaatgaaaacgttcattgggttacattccacagcggatacgatttcggttacttgttgaagctattgacttgtcagaatcttcccgagacgcaaacagggttcttcgagatgatcagtgtgtatttcccgagggtttatgatatcaaacacttgatgaagttctgtaatagtcttcatggaggtctgaataaattggcggagctgcttgatgttgagagagttgggatttgtcaccaggccggatcggatagcttgttaacgtcgtgtacattcaggaagctgcaggagaatttcttcattggttcaatggagaagtattctggtgttttgtatggtttaggtgttgagaatggtcagattgttcattgataaaagcttaaagttttaaacaggttatgttatttattttagattattacatcataggttgttttaagaagtgtatgatcacaagaactaaactctgattttggtttggtattgtgctctcttacttgtttaaagatagcatctcacttaatttatgaaaaaaaaagtttgatatatgtcctttttcatcatatcttaaagatattatcaaaggtatacgtatttggcctattaataaaatttcacaatgtgttaaaagacttaaaggacaacataaattgtggattctgtgaagtgtttaaacattaaagatgaaaattgggaaagattaaacaaacgacagcgttttttaaaaggacccagatattgaaggaatggcccagtaaagcccattaaagtagagcccaggttcgtgacaaatctgttaaaatcgtataattcagggttcgtaaaaccctaatatataacttcgctactcattttttgctcttcgttgcagcctctctctctttaaggttagtctcttactcacttttgcgtagttcctcactgaaaattgatctgtgttcatgtatgtgattgtcttactttgttcatcttcctccgatttggttgtgtaatttcgatttatgtatttattgagactgatttgcttcatttccttggcagatttggaaaagacctttgcttctcttcgttcggaaaaccagctcaaagattcaatatgtcagggtaagtttctcttaagatgcagctatattggattcttactccattcttaatatactgaatcaatggttgatacattatggtttagagttttagttttaggtcgatagatgttattactttgattggcttattctatgtgtgcctcaagctccaaactttctagttggccattgattacatgatttaagtttagttctagaattgataaagttttatacttttttcaatttttagtgatgaggctgttgctgctcctgtggttcctcctgttgctgaggcagcagtgatcccagaggacatggatgtgagtactgcattggagttgactgtaaggaaatctcgtgcttatggtggtgttgttcgtggtctccatgaaagcgctaagcttattgagaagcgtaatgctcagctctgtgtcctggctgaagattgcaaccaacctgattatgtcaagcttgttaaagctctttgcgctgaccacagcatcaaattgcttactgttccaagtgccaaaacactcggcgaatgggctggtgtaagttgtcttccttttttatccttgaagctttctctcctctaaggaagactttgatggtaactaataatcttcaatttggttgcagctttgcaagattgattctgagggcaatgcaaggaaggttgttggatgctcatgtctcgtgatcaaggtaacaaatcctttttacattctcttaatccatgaatcataggaacctctagatacttgcaaagtcattgagaaatgtgcctggtggtttatttgtgtggttctgtgttgattgttacaggatttcggtgaggagacaactgcactaaacattgtcaagaagcatcttgattctaactaaatcaagcaaaaaggtcaagtttacagatgctttcttctcaaaaggaaacgcattttgtggccactctttttttctttccagtcttttctgtttttgacattaaatactcagtagtggacatgtcttgagatttgtttggaacatgaaagttttgatgtttatgtaggttctttcagttcgctcatcaaggttttatattttgctttcttaccacgtagttctacttccattaaatgaaaatttcaatttcggaaaaaaaaaacaaattgacttcttggtatacataacaaaaccaagctaagacagacctgtagcaagacctaattctcctaggaaaaaaatagtttagaaattgtaaccaatcagaaaaaagggaaaaagaaagaaagaacgggttatctatataagagaggaactacagattgatcattccattattttctttcgttgccatagaaattaagaacctctctcaaccctataaaaatctgtcacttgagcattcgggtctctcatctggtgggattgtttttgggttttgattagggcttcttatttgatttctagttgttctttcttgcgcgatgggtgaaagaaaaggcttgaacaaatactatccaccaaactttgatccgaagcagattcctcggatccgaaaacctaagaatcagcaaaggaagattcgttcgatggttccattacgtattcgatgcaacacctgtgggaattacatgtcggaaggtaccaaaatcaattgccgtgaagaaaacgtaatcggagaaacctacttagggatcaaaatccataggttttacttcaagtgcagtaagtgttgcaccgagctgatattgaagactgatccaaagaattcgagttatgtagccgaatcaggtgcaacttgtgtttatgatcaacacgaggaggaggagcaagccgaggacggtggggataggatgagttctttagagaagagaactttggtttcgaaaagagaggttgatgtaatggctgcacttgatgagatgaaatctatgaaatctagacgcgtatcggtgagtgtagactctatgcttgaggatttgagtaaaagacacaaagaagaagaagaagttgcaaaggaggaagatgcagcgttgataaagtctaccaaatttggtaagcagaggaggattgtcgacgaagaaactgatgagatggagaagacgaagaaagtaagaatggaggcagtagatgagaagaaacctaagactaagaaacttgcttgcattataaccttgaagaagaagaagacaacaagtttgggactcgcatcactatgccacaactatggtgctgatgaagaagagtgaatcaggtctgttgaatcaaatcaagattcatgttagaaactatcttgtagagattactatcatgactatttttgcatattgaagtatttttctgcaatctaataacaaaagagtttattgttttaagaattacaacattttggttacatgatattttgggtaaaagtagtttccatgtaaaagcctgcttcattcttttcaagtaataacagggttggaactgaatacacagaacacctctaaaggtatatcacattttaacttttgataattatcatcatcttccttaattggacttcatctcaacgtctgcgtcatctttagtaagagtatctggagaatctcgcggtaaaagaccgagaagaggcagagggagcaatgagctaagattgcagaggataataagtgttgataagttaccaaaactgtctcttgtaatgccgaatgcttgagtcagtcctgcacccataagcccacctagaacactgcctccgttagagattgacatgagtgtagcgaacagagttgcttccattccttctggacataatctcgctgctaacacaagaaccggcatgaatgaagcctgttacagttcgattttaagctgtcagtgcatagatattgacaaattccaataatgctccattaactatggaatcacaaattccaataatgcagcctttgaaaaactcaatgctgacaaatatgtaaacctgagcaaggactgttaggattagagagtctcctatagcaaaccattcgtcgctaatccccaactgtctgttaaaacctgacacgaggataacctgcaaaacataagaacggtcccaagagttattggttgtgtaacagataatagatggcaaagtttttcttgtaaagagcggacgggaaccaacctgagtcatcccaagacccgtgccaaaaattgtcgtcacgagaaagatttttctcaatggaacagtcttcaggaatccattgtacagtcctactccaagcaatgaggcaattgaggtcacaagtttaactcgtcccagaaactccggggtaaaaccgagtttgttcgttctgaggtgaaatttgtaccaaataaaattagttagagactagttaatacattccagagaatatgaaataagccaataaccatgaaggcatgaaccaagtggaagaggacatacgtgaagtaaaacattgcagaatctgagtgtggtgtggcttgccataagaatataaataaggtggggagaaaaacattcggttgcttaatggcaccccatagctgaatcatgttctgctttgaggtctgaagaaaaccaggactgagcagcgttatattctctttctgccctgatgctggtctgaccacacgttgttcattcacgagaacagcaactgctgaagttatcaagggtagtaaagctgtcaccccaaatacaaacctgaggtataacagcttttagaatgccacttagttagttagctatgccacggaataccgaaaaagagaaaagctactgtttgcgcaaattgtgaactgtacctcacaccatatgactccaccagggagccgctaaagtaggaactcacaattccaccaaaagctgaggatccccagcacaaagactgcagcgatcctgacacgctttgtgactcaccacgagcccgttccactaccattgagtctactacctattaaaacgttaaccacttaattaatatttcaatatatccaactctatcttgcaacttaaccaagctaagttaaccagaatggatttgaaaacttacaacatcagaaaaggcgacagagagggaaccgagaagtatacaaaaagcagcactatatttactgtcaacaaaaccagccatcaaactccaagaaaatgcaccaagaagtcccgagagaactagatatgacctccttcgataaccaaatagaggcactgaatcactgcaaaacagaccaacttccttaaacagttatcacagtcaagaggtatagaggtgataaagaactcatacctgataaaaccatagagaggcttaacaagccacggcaatgaagaaagacccgttatcacagctgtctagtcaagaggtatatatttgtcagcctataaagagatattcccatgaaagtccaacaaggaactacaaaaagcatacctcagcaggatcaagatgcaagtcatcttttaaatagaaactaacagcgagcctagcgagtcctaaaacaccttgaacaaaatacaccattgctacagcaacattatctggtgataattcaacaccgtagaatttgattctgctgctactaagatttcttcctttacgagggggaggctgtgttctaatactagaagtagtatctctgtctccttctacatctgtattcgatgtatctccttcagctacacctattcatatacacacatttctgaggattcagttaatggagcttcgatacttgcaaaacctaatcccaaatgccaatttctgaggattctgttgctttaagaacttactgattcgagaatctaaaagcaggctttcctcagaatcccgccggcgaggaagctccgggattgaaactatggaggacatatctctatcaggaggtctcttacgaatcttccggcgtgatagtcggtgagatcgagcggcgatagcaaggcgtcgtctctcgttgttgatggatggcaaaactgtaaattgagaaggtgagattgagatagagaaaagagagcgactcgccattttaatattcgttcttttttttttctttcttttctttaaataaacaacactccgtctcttgcgctacgtagataaattaatttttcttcgtcttttttttcgattgataaattaatttttgatttttctcatgaactatattagcagcttattaaatttttattgacaaaatatgtattgaaccttatattttaaataattttgagttttaatgtctttttatgtgatttattgtaaaaaaaaaaaatcaaattccagtaaaaatatgagatttgaatttttatatatgtaactaaataaatctttttaaattttctcaaatcctttaaaattaataaagaggtgtattagatctaagtgtgtcaaaatgggtaacacaactcaactcaactcataatcaaatgagtttagggttaaatgagttatgggttgatccaactcattttgttaaatgggttaagtcaacccataactcatttaatttaatgggttgagttgttaaatgggttaacccatttaagtaataatttaattaattattattataaaataataataaataattatcattattaattcattatcatcaaaacttaatatatttacggattccactttttacgggtttacgtttttggcgggaaaatctcgggtttacgtttttggcgggaaaatcatggatttacgtttttggcgggaaaatcacggatttacgtttttggcggaaaaattacgggtttactttttctcaatttcatcgcttgtatatttaagaaatttggaaaaatattaattttattaaattggtttagatgtgttggttagacttaaattggcattggtttagagattttagttggtttaattcaattttacaaaatttgatgggttaattggataaaccattgaaaccattaaccattacaacccaactcattttactcatcaaaccaattgactcatcaactcatttgactcatcaactcatttgagtcaaaattttcaactcattagggttcatggattgagttgagttgagttgagttgactcattaatttggaccttacaatttgagttttagctagtttttatatgagtttgatgattttaggaaaattgatgtgatttattataaaatattttaaaattctatataagaccatgaatttcgattttgttatttttaactaaagaactttctcaaatccttcaaaattaataagaatcaaatctaccaattattttcaataacaatagattttaagatagaattttaaatctttagttcaataatactagatttcattaaagtttttcaaatccataatcgaacaacatagaatttataaattttacacaaatcacttaaaatattagattgaatacattcttataaaaatcaaatccataaattatttttaataacagtgaatttaaaggtagatttttaaattattattttaataacactagatttcattagaattttcaaaatccataattaaataacatatacttgtaaaatttacgaaagtcactttaaatactagattgaatatacctcttttaaatcaaaaacgatgaatggatggtaaatatacggttcacccatacccattataaaccgtctttttcacaccttccattcaacaagaactaattgttgcgtatttgaccgatcgaagcaagaaggaacgttctgtttattttcttttttgttaaaaaaaaatcagtatttaaatcgtgatttgtagaagaagtattatcataatgcctctacacaaatctgtaagaattgagagagataatttattttaaagaatcccaaagaagcttcaaagactcaaaaaggaaagtaaccaagaaaaagtcaatggagatggactcaactactacgatcaaaccggagaccctatccaccgtgagttcctcacctccggagaaaatccatctccggccaatgactctttccgacgtcgacgatttcatggtttgggccactgactcaaacgtcacacgcttttgcacgtgggagccttacactagccgagaagccgcgatcgcgtacttaaacgacgctcttttgccacacccttggcttagagctatatgcttagataacgaccgtccgattggctcgatctccgtaacgccagtcgatgagatcagaggagagattggttatgtcctcggaagcaagtattgggggaaagggatcgccactgaagcggtgaggcttgtggcgggggagatattcaaggagaagccagagatgcagaggcttgaggcacttgttgacgttgacaatgttggatctcaaaaggttcttgaaaaagttgggtttgtgaaagaaggtgtgatgaggaaatttatgtatcttaaaggaaatgttagagatatggtcatgtttagtttcttgccttctgattcgttgcactgatctgatttgaattaacaaatatcaaatatatatattaagtttgtttgatgtcgaaatttatattttgcttagtttgtaaaaatcacatgtataatttgatgtgatgctctatctttcttcttcttatgtaattgttagttgtaaccttatatattaactatttcatacaaaagttattttttataatttgagagtaatgtatttactatttaccatgttcacttcaccaaataaaacaaagcttcactatctcagaaaaaatgtaagtttatattgaaaattaaaagtacaaaatgaaacatgatatatatatatatattttctttttgaatctaaacatgaaatattttatacaataaaaagatagtgtgatagctagttttacagcgatagatgaatggaattctgataacattcgattaattaatctttagctaaattacttaatcatacaacatgttgagtgacttgattcttgagttgattttgacagtatataacaaacgattacgatcatttgcaccacaaatattaacagtattaaaatatttaatccatttagaataacttgagaaacagttaaatcctttttgggaatcagaccacacacgatttgacacgtggcattgtgggcatccaactggaagcaacacattaagttccgaaaccagaacaatactttgtttggcaaccaagtaagtgtcgaaagtccaaggtcaaatatagacaattatccactcacacgatgacacctcatcttatgtcgtatatttaacactaaatacacttatctatagcaaatggtaatatttagtgtttttttagtcaaaagcaataagggagaatctcaaagtttttcaagatcgcgatgtgtataaagacatcgcttagacgtagtgatatgatatctaaaacaatcactaatcctaaatggagatggactcagaagaaactaatccaataatgagctcttcgcctccgggaagaatatctctccggccgatgactctttccgacgtcgatgactacatggtttgggccacagatcctaaagtggctcgattttgcacttgggagccttgcacgagccgagacgaagctatcaaatacataaccgatcgtgtcctgacacacccttggctccgagccatctgcttagaagacgaccgtccaatcggctacatcttgatcatggcggttgataacatcagaaaagagattggttatgtcctagcgagaaagtattggggaaaagggtttgccacggaagcagtgaggctagtgaccgcggaggtattcgaggaatttccagagattgaaaggcttgaggcacttgttgatgtggacaatgttggatctcaaagggttcttgaaaaagttgggtttactagagaaggtgtgatgaggaagtttatatgtatcaagggaagtgtaagagacactgttatgtttagtttcttgtctactgatactttgaagtaattaatcaacaaaaagattaattagcaattctacatatatatgttggatttagtgtatgattcatatacgtaatacatgatgtaaacactctgtttttcatttgccaaaaaaatctataaatcctacattgtaaattacgaaacaattaaagtcagtgcatgagacagaagtgaggttagagggatcatccgattacaaattgataggtagagaagagttttaaaaatcaaaggttaatagaagcgtataaacgaataatgtagaatgtaaataaaacaatgggattcgtcctgtatccataaaaaggttcacatactcatccaacaagcaaaagaaaaaaaaagcaaaacatcccatggtccttgggatgagaacttaagagccagaccagctttgttaaaataacacaggatattaaaagtatttgtaaaatttgaattatgaatttatgtaattcaacaaatttactataagtagtacgtaattaatttattatgatttctccatatttcttaaattaaagtaaacaatctttagattcccctgagtttcttcttcttgttggaaaaatgaagtttactcgtgcgtaattcgttaagagagaagcccatgtggcccaaatttagggcccgtgtagtggaggtttcgttataaagaatctagtgagaagtgaagtgagcaatttcttttcttttttttttgttatgaagaaaataatctggaaataagaaattacaagaaaaaatggatttttttgggtaaaaaaaagaagaagaaatcaatcatcactgtgcttgtgtgaggctaatttcgtttcccactttcaaaggactaaatatattactaatacaatttattttaacttctgtggtagaactaaaatatatttggcctatagatacacatgcatatcaaaaaaagttatttttaggttatgtgaataaagactccactccgttcaatatgtctgaccagtcagtccatataggatatacgcatatagtatgaaacaatttattagtatttgaaatcactatgtaagtatgtgatattttctgttaaccaacaaaaaaattagattcatttactaactagctcactaaacatatgtttttaggaattaaaaataatcttagctccaaaattcgataagactatatagatattttacctttaaataggtacaaatttggaatgaaccgcaacatttatcgaattagataaaatatcagaatgtccactcctgtaaatcatagctgatggactttaattttaataggattggagtaatagttaaaggtatttaagtaaatcatttcgatatacacttcttgttctggaccacatattccattccatttttatttatttgttaatgttaggtaaaaataggggttttcatgaaaaaaaaaatagagctgatcattgtctcacttcacattgtacaagaatgtttttattttatttttaatttgggtttaaaataaataacccaaaaaaaaagggaatttagaagtgttgttgtaatcacgaaagctgaaacaagagaaagcatgagcaaataggaaaaagagaaaagcatgagattacacaatacactctctgcactttcatactctttttcaatcatttcattctacattcacatctttacactattctctctcttacctttaatatttcaaaacataatatacaaatttcatctgattaaattacagcttatatactcaaactaatgattgaaaattattaaaccttttgcacgcagtgctacaaaaaataatgcaaaggtatttgaatgttgatattttgactaattgcttacaattataactctttatgagattgcagaaaaaataaaactaatcattgaatttctgtattccaatacatagaatcagagaatgagtgagcttcgaggttatcaagaagccctaactttttcagtacaaagatcatcacaagacgttatctttttattcttttcacttttcctttgtaagaaaactatcataatgaatgaaataattgcttttgctgtatagtatttttgttacacttattaaacggctaaatcttacttatacaacaagcattacactatcattgtctcgggaacacacttcaatttacaataataatattatcaaaaactatccctaaaaagactgatgaagaactaaaaaaaaccttccatctgtcagtttaataatcctgcacaaaaacaagttttattaaactgttgttaccttatgagtagaatcaaactgaattaaattgtgattacaaattaattattacctacactgtaaaatttacttttaactcctactcctgacatgataaatgaaagaaccggtttgatatgcgaaattctattaaccaagacaaaattacaatcctttatacacctgtaaaccggaaattcaaccgttaaaatcaatcgaaaccgaaccggaaacagacataggaagagaagttggaccaacctgttatttgtttcctttgtgttaaaaggagcaatgaaatgtctccatcatccactcctcaaggcttcaacattcgaacaaaaaaaactttaattgacctgacaaaagccgaaacaaattatataccataagtgatattaatatgatgaagaatcatatacaattataactctttatgagatttcagaaaaaaaagatcacacaacaaatcttggtgtcaagaaatcttccatcattaatattattgctgatgatgatgcagagacaatatcttatcacattttcgaatcgaaaacacgaaaacagatcgctttaacgggtccatttttatccaaatcaatgtgatgtgccttaaatgatatgagaggaacgtgtggattatacttttcttggctgatacataataaatgcagacctgtctcattggacttaagtctctattttgagtttcaggaccacaactattactactagtctactcctactaatggactacattggctttgatcaatgtcactgacactacattctatctgctatctcctaattttatggttagaattataaatcttatgaaaaggagatgttaccgtaaagaagaaggcttttcaattttcttttagaaaaatgttagctcggtgtatccgcgggcgtaaggtaagagttcttcagcttcgacccgtgcagtggagtgactattggttcgctttgatctcttgtgatttgactcaacctctgcgctgaatatgccataaaccggtctatgatcagaaaaccgtgactcccctcttacataagataactgatgtagtccttctccatgccatagtattcgatcacacctttagtaacataaccaaaaaataccatttttagatcattacttggttcttgtttattattctgattgcaagaaacttaccaagcaggagtacgacgtttctcctttggatgcaaatcacctcctgcatatctatccgagttatttgagtatttgtaagttggtgggaagtatatctttccttcgttccatcctttaaacacatgtcctcgtttctgctctatccgtaactgcagtgaaaacgttttcaaatgttttggattagaccattctataaagtaaaagtaatgtgaaactctatagtctctattgctttatttgtctactacgtatacctgatcgttctctagtaatgccctccagttttgcatctcgacaagtgcttttgcggatcggtaagagagtgctattcggtagttcagatccccgagccatattacccgactaaatcaaatggaaacaaagacaaatgagaaatgtaacaaatcatgaatcttaagcaaatgattcgattcttgtcatttcttgatgttcggtcttactcatgctgaaggatattctcaggggacttctcgtccgcagaactctggactcgaggaaaccttgttttcttgagtatctccatgacatcggagtttctccttagctcatcaccttctttttgtcccgaggtcaaatgggtgcacacaaagcagaagcttgtttgatgaagcaacatactaattgagattgatccctacaagaaccacagaagcacattatagcaatgcactaactaaccaactaagtcaagcggtaacaaacataagattttttaccttatttccgagataacccattaatcctctaccaacacaagatactttcatgttcttgacgtgttctcgtaactcgcttttcacccaaatggttaaaaagataccaaccatctgtttacttgcgaccaaacagtactgcgatgagttccacggggttctgtaaccgttttcgtttgctgcagaaccaagaaatgaccccggtgaattcaaaaatgtgcttggagaatcccctgggccgttatcatcatccgaggagccccacctggaaacatcactaggccgagaatagttactcggcctagagtaataatcactcggtctagagtaatcactaggccttcttgagtaatcactaggcctgtgaccacacctgaagctcgggtcaaaatcacttggtctatgactgaagaatacgcgatcacacacgctgaaacgacggtcaagccgtggttgtgagatcgaagggtcattctcctccatactccatacgctcggcgtctggaaagatcttctgttgaagaaagtctcgttcttttgccttgaagatcctgagaagtcagcatcaatctctgcaatggggacaggaataggcgatggagtatggcatgcactgcttgctccgggaaggttattgagcgttttcctgatgagtgaatgccatttcttagcaggaccattgtcttcagctccaagaacattaccagcattaagaggaacaatctcttggaacctaaaagaacacacaagataagtaagaacaaaaagagacattcttgaaaagaagatgtaaaatggaaacacacccgagaacgtatatatctgcaggagctgaagaatgaagccattcgtcgaggtttaaatcttcaggaggagagcgtccagcaacgttccatgtagctacgaagatgctgttctcaagaatcaccaacatgagattctactaaaataagtcacatatgtgtgtgtgtgtgtgtgtgtgattgtgttcatatatatgttacctgtggttttggacatcaatgattctgggattttcatagttcattttcctttgtctagcttgctgctcccagttcttattgagtttttctgtgaaactcagaaatcatgagaccaaagaagaaaactctctcatagagaatttgatcatattggtaaatgattatataccagttttgctcttcttgattgtgcagggctctctctctgagaagctgtttctgtgctcaacttcaactccttattgaataaaagatcagaatttgaaatcagtacataacaagccaattgctaattctttaatttccacagagaagagtggttaaagcaaaagaaacagtaactgtcaattgaccccaaaagaaaagaaagaaagtgaaactgagatgttttgttttctcagaaaagacaaaatattacaaattaaagctctgcagaacagaacaaagaaacaaaattttgacaagaagtagacttttggttaccttgaggaagagaaacatctgcttgaaacttttcagttttgcttttgatgttgaaccatttcctcaccatcttcttggaccatgacaacttcattgaagcataaaaaaaaagaaggtaaatgaaactgttcatctgtaaaattcatgaaagatggcaaagaattgaagaaacataaaaacaaaccttgcttttcttggttttatcgtctctcattcttgctcttatttgattcactgtttgttcttgagactcaatccatccaaaaaaaagaagacaatagagatcaaatcaactaatttggggtttttagttgaatcactgtttaaaaagaattgacaagatttggcttctttcttgtcctttgattgaatcagacagaagctaaagtaaagacaagttggattaggattaaagtgttttgtgtctctctactaatgctctcagggacaggaattaggaaatgggtatagtgttttgagacaaatgagaagtgaagattggttttcagaataagaaggaaaaaagttgttggaagagacaagagttcttgaaggaggaggcaaagaagacaatgagaaagattttggagagagaggaaacaaacaaaagtgtgatttgaagagagagtggtggtttaagcttttctacttaggtcctgaatcttcttcttcttctatgaaagagaaagagaaagagaaagagaaagagagagagtgagtgagcgagcctcgttctcagtgaaacggcaaagtaaaagcagaggattttgaacagaataaagcgcagagagagagagagagaatgagaatgagcttattataaggaaccttcaattcttagattaatcagtaatcactttttttttttttggctgagtctaaaatattaattagtcaaaaaaagttttttgatttgattagaagaaattaagggaggcttattcaattgtttttgttgtctttcctattggtaatggtttgaataattaaatattgtccttaacgattttgtgcttcttggtcataaactcataaaatatccctattttaaaattttgattagtagtatttcattttcatatgaatcgtcttaaaaatatgctacttgttcatgttttagtgatttctttattttcatcactcacaacattgataatttttttttacgtttttgataaatgattattttgaaaatatgtatatttcgtatttgtatttcttgtcgtatatccttgtatacatgcttagggcaatgttttatataggcctacatctcttataatataaatcattggaaatccacagaaatttccatatgtacttccattttcttataaaacatcttgtctaggttaataatacactattatattttaatttttaaataatgattctgaacaaaatataaaagcaatagtaattatgtttgatgtgattataaaactaatactaaataactaataaatttattttgaattaactccttcataatcaacttaagaatatgagtgatgctagggaatcgagaggtctgtgtctgtgtctttgtatcattaataggtcgaagaaaacctataaggtaacaagatcatgacggatattaaatcattagaccaaacacacacgcaaattaacaatcattttgaaagttttcagtttgtaaatgctaaacgatgtgatcaacgtctataaccaaatgagcattacatagccttccattcaacaacaactatagaaaagaggattaattccacacaactatacacaagcataaagcaattaactaattatataatactcacatatatatatatatatatatatatatatacatgtgtgtgtgaactgtgaaatgaattgtaaaacatgatgaatcttgtttgcttttgactgcctcgtaaatgttgaaattttaaggatattaaagggagtcttccaaatcattttggattaggaaggagcaaaaagttaatcattatatagtattatagaatcaactaatgatgcataatactacactattataaatttataatatagcaaagtttttctatagtcatgcttttaccgtttttgttacttacatacttcttgtagaaaacatctatttgccattcaactgcttaacaaacgtgtaattttatctgaaaaagacgcccacgtttaatttcgttggatgacaatgactgtatacatgtatacactattttaatctacgattggtttatataagtatacatatattgtatagtatatgcatggatagtcattgtagttataatatcgaaacggattcttttgctttaaaaaagacaaaaataattaaatatttggataggatgggttttggcttttagaaggccagatgccaaacatgccttcatcatttcgtctttcccattccaagtccctgcctcacaatgttggtctttttctgctttgatttttcgtacgtccaccttaaattattttcttggtaaaccatattaattatattactttatatcatagtataaactgtttatggtctatgccgttagggttcactttgatgcgaatctatgcaaatatgtataactgtataaggatcaccaagtagttctatcgtttttttgctaatcacttaccaaataacagaagttcactactgtaatatatgttgaattaaaaaacataaaagggtatcataagataaacaaattaaaatatgagataaaaaaacaaactaaacaaaacaaaactacagtggttggttttctacatgatatatccatatagaaataatttgccgccacatcaataaacgatcttcccacgagtcgtttcttcgtcagtccactatcacacacacgttgtcatttattctgagttgtatttaacacactttgagtttttgacctgacttttcgattttcttatatattcaaaacgaaattatactacaaaaagtagaagactattcacaacattgtcaacagaatttctcaaaataaactgttgtactcgtacgcgataatggatatatgatatatccaacgtttcaaagatatcatcaaaaatattagggtttgtttcaaaggaagaaacactttttgtcaacaaaggctcaaagctcgctcacatctgtacacatatgatgatatgatctagtatttgtatcatatatatgagcatgcatgtgtatgcactgatgcacataacacagactttagtagagtatcctagtatcttatgctcaaacaattgtgctccaagaaaagaataatgatatagtttttaaaacttggaaatttcacagaatctataacttaataagtatagcaaaatataaaaagaaacaaaaaaagccgaaaaaagaaaacatattgaaagggaaagatgatatgtcactacaacaagacacattaccctttattgtttgctttttactttgtctggtagaccaaaatctaggactaggagggatgggaaatgtaaattttagtcagtattaaatgtttggattgtgatatcgtctttacttatcgagcatgatttttgccaaatatatctcctatatatgaatggacacgatcaaattcaaagaaaccttttgattacatcgcatgttattaaaaaagcttagcaaatcctatttttattcgtttacgattttaaagtaaataatataaactcaatctactctacctttttcggatatttaaatgtaaatcacacatacacaacttactctattaaacaagagaaatacgatttatggattcaaggaattttgttgggaatttgttcaattttacggtatacaaaagaaccaaaccgaaaccaaaccgaattttaagatgtatactaaacgatgccgtttaatatataggaaaaaagcggtgtatagtcgtcgtttctcgtttaagctgattttagtttccgtcgccggctaaaaagctcattcgacgccgcctgagctttgagttttgacccgattctgacgtcttcttcaatggctaatctcctcagagttcttatggttagtgaactgggttctcctattaatcaatttcgattctacttctcccatcattatttcttcatctcttacaattcttcttttcatcaggtggcggagaagcccagcattgccctctctatagcttcagttctctcacatggccaggtttatatacctctctatctctatcgattctctagtttctaaaagcctaactgcaagtagctttgattttagtaccggaactgttgtgcgttaattcgattcttgttgaattaagagatagaatcaattgaagtatgctcagctctgatggattctttaacgtagctttgttgactggatttcacttttaaaacttcagtatcctttagaggttaaaaaccgaatcagttgtgtgtgttccaacttggatatctttctccttctgattcagatgtctacaaggagaggcagtacagaggtgcatgaatttgatggcatgtttcgaggcttcaaagcacattatagagttacatctgttatcggtcatgttttcaggttctctcttgcctatcaatcatattcaaatcaaagagtcatctgctgctgcataatcacactccctgtataatacgcatattcacgtttctctttttcttgctgccctcgcgagtttggaaaatggttttcatctttcattatctcttggactatatctcgtgtacaaagctgctgtgaaaaccattgcttgcagacattccaaatatttcaaagcagatttctcagtctttctaaataccactctcatattctagtgtagatttcccagaaaaatatcagaattgggcaactattgatccacaagatcttttcgacgctccaattattaaaaaggaatcaaacccaaaggtaaatagttctcatgatcttatctcttttctttgtgcatggggagtgctttagctgggttatacgtattgttagtagtagagatgcatctttctagtagtcatatgtttcttgtattcttttatttacggtattacacttttctctaacagtcttcaaatctcaggctcatatttgtaggcatttaagtaatgaagctcgtggttgcagttatatggtgttgtggttggattgcgatcgtgaaggagaaaatatatgttttgaaggcaagtctttagctaccgtttttcatttttgttctcaccagatttttcgcttgagacatacaaaattactgtgcctaaccattgcatccactctgctggtaaatttgattcagtgactaagtcttctctgtttttactaaatcaatctgtatatgatgccagtatccaatggtagaccctttaagttgtagtagtagattgggtgtttaagtatacagttagcccctgcatatgtggtgcaaccaccaatatcttaatctttgttctcctgcaaaagtaccttttgcatgccgattatatttggtaatgcacatggccgttgctttaacttgttgaccattaaatttttgtagttatcgagtctactggctttgacatgaaagatagtaagagaaaggtttatcgggcacggttttcttctgtgactgagaaagatatatcaaaggccatggacaaccttgttgaaccaaacagagatgaggcactggcagtagatgctcgtcaagagatagatctaaaagttggtgtagcattctcgcgatttcaaacaagttatttccaaggcaaatatcagaatctagactgcagagttatctcgtcagtttcctcttgtctccttcctttcctctctttttgttctgtgtaaagagtcgctgaaaagtagggtcaacttctttctttagtccaaatgcattttttttcttttttccttggggtatttggtacaattgatcatataagatgcagctatggaattctgttgtggttatctcctgtcattttgagtgtcagagtaatgcatttcatgtaaatactaaaaaagagtacagacatagctttgtaagacttaggcttgtatgttgtttatctttgtcgaagcacctctttatttctcatgataggacaagaaatgagttgtcgtgattcaatcatggttctggttctcttgggggtttaaattcgatcatctgtgttttccgtactaagtattcctcagaatgctcgaaagagtgtgcgtgattttctgtccattccgtcagatttcacattcaatagtagttttttctgttaactatattgtcaactagattttcccatcttttttatgatacaagtcactgtatccatctggtttaagtcttttaactacttaaagatccttttgaatgtttatttcaggtatgggccatgccagacacctactcttgggttttgtgtgcaacgctacatgcatattaatactttcaagccagaaaagttttgggctctgcgaccttatataagaaaggatggttatgagctccaactagagtgggagagacgaagattgttcgacctggaagttagtgtctcattcttgtcttagaatttctttgacattcttgactgttgctttctaatcttatgttgctgatatatatatgctttaacaaattataggctgctactgtgttccaaaagttggtcgtggaaggaagaactgcaaaagtaatggacgtatcagaaaagcaggaagtcaaaggtcgcccagctggtcttaacacagtgaatttgctaaaggtcagaaaagtcaggagtcgtgattaccattcctttaaaatgaactcgcctggttgtacattatactttaagcaaacaccatatcatgtactaatgatcgcagtacactgactgaaaaactgaaatattctgcatccaaagaaattttgtttatatcagcttcataattgtttttggggatgagttggcaacaacattgggatcttcgttctcttcttgttttgttaattctgtttttaatgttgggattagagctttgccattgcttagtcttgttcacgagttcaaaggtcaataaaagctacttttatgcgaattactctcctgatcgagcataacattagtggttacacaggttgcttcaagtgctctagggtttgggcctcagacggctatgcatcttgcagagcgattgtatactcaaggtttcatcaggttcgattgctccattctccagattattatttttgtcatttaactcctctttaccagcgtataattggctaattttggtaaatcccaattcgttattgaatggtagttttgtttgtttaattaagaactggtagataggaaatggaaaaaaccgtcgctgacgagaacatacatacatcacaattttcgctgtataatttatttaaacatttaaagtgacggaaacttttgactcaaagtcctttgttttgtgctagctatccccgcacagaaagcacagcctatccttcttcattcgacttcacagacacactcagagcacaagttagtaatccagtatggggtggttacgtacagagactgctctcagacggatttcatatgccaaagtcaggaactgacgctggagaccatcctcctatcaccccaatgagagcagcaaccgaggtcatggtcggaggagatgcttggcgactctatcagtatgtctgtcaacattttcttggcactgtttcacctaactgcaaatacataaggtaaataaagccttgtttgtagcttaatccatgtcagttacagcttattctttgcacattttaaatgtggtattctcttggatgggtatctcaggactaaagtggaattgtcaattggtggagaaactttccattgtacggggcagcgtgtgacagaaaaggggtttacagctataatgccatggtctgcagtagatgagaaaaaactcccttcttttctcaaaggagagaggattgaagttttaagagtggagctttacgaggtcacattcttctccagtttttgttactgctctctttgctttgtactaggacacaaattactataatgtttccacttttagtttattttttctgtttgtatttgaatgttgtaaaatctacaggggaacactgcgcctccggactaccttactgagagtgagctgatatctctcatggagaagcatggcataggcacagatgcatcaatagctgtacatataaacaacattggtgaacgtaattatgttcaggtgggttaacctacccaaaggcggtgtgcttttcttcactgttacaatgttactctctcaggaagatccttttttgttttctgaaaaatctcattactcttgtttggtgcttacacacttttgcaggtccaatctgggaggaaaatggttccaacggcgttaggaatcacgctaataagaggctatcagtgtattgatccagacctttgcttaccagacatccggagttttatcgagcaacaaatcactcttgttgccaagggccaagctgatcattcacacgttgtgcagcatgtgattcagcaattccggcgtaaattcagttattttgttcaacaggttgggaaaacctggctgatattatgttttcttcggaggcatttactgatattgtcttcgatttaatctgttcctccttaacatctttcgtatattgtcctttcagatcgaacacatggatgccctctttgaagcacagttctctcctctggctgattctggtcgtgctttaagcaaatgtggaaaatgcttgcgttacatgaaacatatcacagcagtcccaccacgtctcttctgcggcacatgcgaagaagtttattatcttcctcaaaagggcacagtcaaggtaaaaccctttcgtcaccttaacccttgagctgaaacctcagtgaatctctagtttttcttatcctttgctaacggattttctcacagctatacaaggaactcacatgtcctttagacaactttgagctcgtgatctattcagttccaggacctgaggggaagtcatttccactatgcccatactgctacaactctcctccatttgaaggcatagacacactttttggagcctctaagacgcccaatgctcctgccaaaaccaaaaccggtgcaggcatgccatgttctctctgtcctcatcccacatgccaacactctgtcagaaaccaaggagtctgcgcttgtccagagtgtgaaggcacgctcgtcttggacccggttagcttccccaagtggaaactcaactgcaacttgtgtagttgtatcgttttgcttccggaaggtgctcatcgcatcaccaccactagtaaccgctgtcccgagtgtgattcagccatcatagagatcgatttcaacaagaaaactactcctctggagaacggagccactctgcatcaaggatgtgttctatgtgacgagttgcttctctcacttgtagaagtgaaacatgggaggtcctttgtgaggcgtggaggaaggggaaggggacgagggagaggccgaggcagaggagggagaagaggctcaaaatctgtcgacccaaaaatgagtttcagagacttttgaaactctaaactttgtgtttatgtctttgcgttacttgcatatcattggaaattcaaaattctgaaatactgcctgcgtttcaaggaacagtttataatctttttagctttacttcgattttttccacatacacttatctaaaacagctccccaaaacttttaaacatttgactaattcttgtttatgccctaaagaaaagctaaaaaacccaagtgtaatcttttgggcttgtcacgtgtcacatgtcatgcatacaatctttccttttttagatcataacaacatagttgaatgcatgatctattctctttgcaattactctgttttttgcttgtttaaaagtttttgaagaggaagagcaaatcattgattaggaaaatggagaaagcagttcactcgtcgaccacgtctggaccggcggttccaggggagacaacaaagaccggaacctccataattgacactgcagcctccgctgttcaaagttttgcaccggttaaccaaatccaccaacatctctgcgcgtacgtaaaacccgatctttgtcaactccacctctttttaagcctcttagatttgtgattctcactatgaaagtaaaaaacatatagctacttgttttgaatatatatatatatatatatatatattttgggccaacaaaaaattatgtgtaatcaattttaactaacaaggcaccaatgagcaatctcgtctaatttttttattcgtgataaattctatttcgatttggtttaaccgtatttacaatgttacagagaaggcatgttatttaatttcttgtgatggcaggttccatttctatgctgacgacatggcacgacaagtagaggctcaccatttctgcagtcacgtgaacgaagagatgcgtcagtgtttgatctacgacggtccggatgcaaacgctcgtctaattggattggagtacatagtgtcagagaagctgttcatgactttgcctgacgaagagaagaagctttggcactcgcacgagtgggaagtgaaaggagggttcttgttcatgcctggtgttccaggtgccattcagcgtaaagatcttgataaagtcgctaagacttatgggaaagttttccatttttggcaagttgatttgggccatgagcttcccattggtttacctaatgtcatgatggctgttacacgcgatggccagcttttccacgagatgattcagggtacgtaagaaaattcgtatattagttatatcatgtcttatattaatgtgagatttcttgtggttttacattttaattttcttagaaaaaacaatagacagtgtttagtttaatgttgaaaaaacggtctaggtagttatgactattattttttaggcattgaaattaagcgtttttgtcataaaacaattataggctgtctatatttaactcttaaccaattatcgtttaattgtcaattatttgctcgttgacttttcaatttatatttatgtagaacggcgtctagacatgtttagctaatgctccttttatttatggcataatgtagtaaagactaaagatcattggtaggttatgcttggatttgggtatggattcagagacagataagcggtttagggtatcaatagagaaacaacctagaccggtttagctagcaatggcattgatatggcacactgtagttagtatatatcatttgtagttgatcggatttggatttgatgatggatgcagaggcagagaagcggtttggggtatcggtagagggggagagggactcacgggcgtatatgtctggacctgagctcgggatccatccattggcgaatggaggaggcaaagggatgaaactagagctacgagaggtcgatatcaagccggttgagtctgtcggcagcgtctttgtctgagtttacttaaaacctctaataatgccctcaaagcaagcaatgtatgttttggtaaacacaaaacgtacggaactagacaacaagattacttaaaatagtttggattatttctttgtggatcttatttataattagtaataagataagaaataatatctataagaaaaggttaactaattcacatgaattaaattaagtaaccatgaaaagcaatgtagtaaacaatttagttagaaaggttgatatatactattatataattcagctccgagcaataggaatcagactcgagagccatactactctgacttgatttttggaaataaaaatcacaagaagaagtttctaaccaccctacgtatgtatatgattataaaattgagattatgaaacatcatgacttttattccccaatcaaaaaattcctctgtaagacaccacaccaaaatatttattaataatatattatttgcgtgtgactttctgacatttttctctctaaactttgacatggatcatcaaatcaagaacaccatgaagaacaacaacagttcatcagtttcaatcgagaatcatccatggaagaaaaaaccaaccactcttttacttttcctttctcttctctccatctctctgcttctccttcgtctctcccaagacaaaatcatactcatcaccaccaccaaaaccacagccaccactggaaccgatcatcaacgcagtcacaaatcttctgaggacgatacgtgtctcggacgctacatatatatccacaatctaccttctcgattcaatcttgaaatcatcaaagattgtaagtctattacaagaccaaaggacaaaatcagtatgtgtaagtatctcgacaactccggattcggacctttgatcggcggtaaaagttctgactactctccgagctggtacgctactaatcagttcatgctcgaagtgatttttcacgagaaaatgaagagttacgagtgcttgacgagaaattcttcactggcttcagctatttacgtaccttattatgctggcctcgatttccggcgacatttacggcggcgtaacgttgctgcgagagacgccgccgggaaggaacttgttaaatggctcaagaagcaacctcagtggaaaggtacgcgtgttttactttttagtattatttcgttttggacccctaatattttcaattgtttgcaattacttcttgctgtttcgatttaatcaatatttactcgaaattattcaaagctagcgatgacttttccaccgacgacttttaaatgaaaacctttttattctcgaataaatgtaaacctttttaagtactctttagctttcacaaataaaataaaaattatatatgaaacaacacaaaatattctataaacgtagctatcttatttattgacatcctataatatattggaagtgaaattttagtataacattaaaatcctaattttaaaggtttttaaagtatgtcggtcaaataactttttttgacataactacaaaataaagttcagttattactaataaaaatataggtatattctaccatttcctcgtaataactgacaaaattttgcaaatcacccaatttaaatttaaatttgatataaatttacaacattcaattttttaacgtgtatttttggtccgtccgccaaattttctttttgacaaaatagccaattaaattaaatattttgtttcttttatctctaattgaaattaaatgcagatatgtcaggtaaaaaccatttccttgtaaccggtcggatttcacgagatttccggcgaaactccggcagtaggtcagcatggggaaccaacttcatgctcttatctgagtcgctaaacctcactttcctcagcattgaacgaagtctaacgagccacaacgagttcgcaattccttatcctacttactttcaccctacgtcaacccccgagatccttcagtggcaagaaaagatcaggcttacaaaccggacggtcctcttctcatttgccggagctcaaagaccaagcagaaaccagaacggtgtggttcgcactgaagttataaaacaatgcaagagttcatctaaaacgtgtaggtttcttgactgtgacgtcaatgcaaatagctgtgatgatccgatcagtctgatgaaacttttcgagagttcgactttctgcttacaaccgccgggtgattcgttgaccagaaaatcggtatttgattcaatcttggctggttgtataccggttttctttaaccaaggaagtgcatacaagcaatatttatggcacatacctaagaatagtagcaaatattctgtttatataacggttaaggagctgagaaccggtggaaagaacaaaatcgaagagattttgcgtggaataccaaatgagagagtggttggtatgagagaaaacgtaataagattgattccgaagattgtgtatgctaaaccaaaccggaacaaaccggatggagagattcttgaagattcttttgatgttgctgtgaagggagtgctagagagaatagaagggataaggagaaacgaattcaaaactgattagcaaattttatagttagcctaaacaaatgaagatgtcctacatttgttattgtatttaattgttcataggtcttgtacaaagataagtctatcaaacatggcaaactttctccccaattttaaaaccttttgatatgcgaaaatttcaggatctatgatgtagtaggatacgtatgtctgtgaatgaccattttaatgtcccctttgagactcttacgcttagggagagaaacagacgaagagagaagacatagaatgtcattgaatcatctctcgatagctttcattaatgtttgtcaataaggattggttaaagcattagtatatttagtctcttatcttcggcccaaagcagcgtaaagctttgaatggctttgttggaagacgtaaagcagtagtagcttgaagcaaagtgtggtgtggtctatggggttcttaattttaacggttctttctaaaggtgattaccaaattttggttgatatcaaattttataactctcagttcttatatgtatatctctcgctcttctaatgaatatatctattcatattttggcaaaacatataattatattttattttcaaattgtgtatacctaccaatctaccatcatggttaaccaaaaatttgtatcataactaattaactatttttgttttgttttccgttgaactaggaggccaggaggggagaggggtttataaagttatatgaaagtattgttgtgtcgaaaagaaaagtttatttcgttaaagagcttgattgttaacaaatacataaagacattatacatttcctcttgtccgtaacggattgagttgttaattattgaatagttcggcatacgtataagagaaggtgctacgtgagcagcatgcgaagagaagatagggcagatgtcaaattcagttgatacgtgtcgctctcctaaacaaaaactctctcttgcatgataacaaaatcagcaaaacgacaacaatatttcaacaccaaatcgaggcgataaggaaaaggctaaagcgacccatgatccctcgctcctttcgtcaaattagaatttaaaactgtttcattggtgcaattaaatgatcctctaaaaagtgtttgaacataattatttttccatatacatccataattgtataaacttttgtgagaagaaacctacgaaatttctgtctttttaacatattaatatcaactaatagatggtgatctaaagtttaaaaatcaggtatcaaataatttcaatttcattttgaattataagtatggactagttgacaatcataaataaaaaccttaaattaccaaaaaaataatccaattgcttagattaggatatataattagtgtgttcgaatccgatttacaataaaaacaaaattacagatcggagcaattcacatatatacgttaaaaaggtgggggctcacttcacgtggagacttaattggatcagaaaagtaacttaaaagatgcggaaccccgaaggtgccgatggcatggggacccattcacgtacacccaaacacaaacaccaacattgcctaaactctttctctatataaacacttctctttctttttctttctctcacacaaaaatacaacaacttagatcagtctcaaagggggaaaaaaaacttaaaagaaacattaagaggcaacacaaatcacacaaaagatcaaattgaagcctaagaagaaggcaaaaagtgagaagcaatggctaccatgttgaaggtctctcttgtattgtcattgttaggttttctggtgatcgctgtcgtgactccatcggcggcgaacccattcaggaagagcgtagttctcggagggaagtcaggcgttccaaacattcggaccaacagggaaattcaacaacttggaaggtatgcatacatgatattgatacatctactatacaggtatgatatgaattagaaatgtgatgtgattgtgcgtgatcacaggtactgcgtggagcaattcaatcaacaagcacagaacgagcaaggaaacataggatccattgcgaaaacagacacggcaatttcgaatccattgcaatttagccgagtagtgtctgctcagaaacaggtcgtcgctggactcaaatactatctaaggattgaagtcactcaacccaatggctctaccaggatgtttgactctgttgtggttattcaaccatggctccattctaagcagttgctcggtttcactcctgttgtcagtcctgtctactaactttatttcttcttattcgacttaaatttccataatatgatcaagaaaagactaaaaggtgtatgatacaaagctattaagaatgggttaatagttggttttcatgatatgtttacgttgttcataaataaaaacaagttgttattaagaatatgcgatgagacttgatgaaatatcagaaccatcaacaaactttggaatgttgtagcattctcttaacaaaaacttaacataagggttcaaagagttgcctcctctacatactgatttttcaattcaacagaaatttttgcacacatctaatcaaacaatgtgtagagctgtatataacagagccaagaaagctacacgtagcttttcaaaaagatgagcttaccgttaaacattagctgaactgttatgttggtttatagaacaagccactggtttatcaatcaaagatctcttgggcctcgattatgctgtgttgcctgataagatccccagtgaagtatcaggtcttgaattcagagtaaatggaaaagcaagtatagaaagaagaaaagatgagagcgataatagtttgcttacatatcatcttttgcgacccggtaatatttttcagcatgttgcctttggccaatcatttgagcaaagcgttcatcgtgggtaatgactatgagttggaaattctcttggccctttctgtcttccatgatcctggagaatacaacgacataatatgatccaatgttgagagcaatggtcttaggatgtgtaacaacattatacggaaaagacaggaaagtcacaataatgactccagtgtttagagagttaaatgtctatgtaagaggaaatatttatatgtacccatgtaccatcatcataactcattaggggtatagatctgaagtcttacctaagaagagctcctgcaagagattctgaattgggcccatccaggtttgtagttggctcatcaagggctaatattccacagtttaagcaaaatgtctcggctaaagccaacctaattatcaatgaagcaagaacctgcgggagatgatgaagaagaaagtgatcacctgagttcaacaacgaagcttaaaataatattgaactgataactatgcttttacaagaacgattttagaacaattcaccttttgacctgcactgcatcttcctctcatttcaagttctgtatcaccagtctgcataagaacctaagaaaaaacaaggttgacaacgatgctaatgatgatcacatcgtaaagtatgttgtcaattctgtagcataccttgtagctgtaagagcgggtgcctgcaccttcggaatctgagtgtattcgtatgtaatccatatcttgacctctgtatgtctgctgccacagttcccttataatcttatttatttcctccattttcattgtgtggaagcgcattagtgctctgtatggaaatatatgttaaaaactgcagattaaatgattttgttaattagatagtgcaaaatgaaaaacaactagccagaaggttatataaggactcgagaagcttacttgtcaagggcattgtagtatctatccaagtctttatttgccatttcagttgtctggccaaaatgaaatgttcaatttaacataaagtggaatttgttgaccattcaggcactaccacaaggtaatactacgtcttacctttagctggatcagttgatcaaagtgccgcttatctatgtccttgtattgtgcctgttttagctccactctgttctttgaaatactgctctcgtaaacagacactgttccacgacaccggttcagctacaagaaaaatataattactattcaggcacaataaaataggctctgaaacctttcaatggataaactatctttaaataatcaagaaaaacacaggtaactcgacgttcacacatatcagttgctaacagccacgagcaatggtagtcagtgaagaaaatctgttatctataaatgataatttctaaattttatatattttggctaccttgaaacaaggatataaattttaaaaaccaaccacctcggatattaaatgcttaaatcagagaaatgcaagatcttacacttagcatcatggagaacaaatgaatagctaaccatagacaccaaaatcatatcaggtgatgactgctataaatatataaggatctgcttacctctgaaagaagtctttccctttcccgcaatatctttacaatttcagcttcaactgcggcaatcccaccaatattcaatatttgctcttccaatgattcaatctcacgtgtaagctcctcaacttttgcttttgttgtccggtagttcaagttatcctctatatttcttctcagttgatcttgattccgcatcaagtctttatttctgttcagttcacctgcaagttcattctttctagcttcacagctctgaagctgagaatcagataaccgctgcttttcttgaatatcatctaagcgctcccctttcttcagatcatgatacctggtaaagcagctgtaaggatatctggtgcacaggataataatgaattaacctttgctagcagaacatactcatttattttataactggccttgagtaatgcctcaacttcctgttggtagtttctctttttctcagccagttcttcatactcttgattacgtctaatcttcatatcattgtagtcactcagtaattgctctttttccttggataaagggcccagggcctcggtcaaatactgaaaaataatgaaatgaacaattaaatttttaaagattctacatttaatgtaacagagaaaatttgaaacaaaaataggaaagaagactgaatattactttttgcatgtttcgaagaagtacttacttgatcacatttcaacgaatgcacagaaaaaatatatttgaagctttcaaatacaaaaactcaaacagttacaagcaaaataccatccaactcgctaggaatgtacttattgctacccattttattatgtattctctatatatctgtgttgcattgcattgcattactagtaagcaaatttattcagaaagaaaatgattcactaatctgttttagcacattcctcacaaagtagtactctcattcatgatcaaggacctaataaattaggacctttatagtcaccaatgaaaaatggagtttgatattgcacatttctcacatagtagtactctcatttaagaccatagacctaataaattaggacctttatagtcgccaattaacaatggactttgatatagtgacacacagaaagacatgtggaaaacaatctaaaacgctcatcaaacgcaccttcacatcgaggtcaagttgacttttctcctcggctaaacgctccaggtcttcttctgcctttgtaacgtcccgtaacaaattggctgccttggccttctcctcccttactgcatgccatctggcctggaggcatgatatatcacgttccatgtaaatctggtcatctctaagtttctccagctcaccgtgcaatttatccctgttcaagggtacataaggaagaaaatattggaaattatgtgtctgctagactaagaaacgtccaaggaagagaaatatgttctaccctgcataaattcagagtacttacttgctgctttggaggctacttaattctgattggatttcttccatagttttaaccccaagacccctaaaatcaagcttatattcaagatcttcaatttgcttttggtaggatacgatttcctgaaagatcctgtcagcattttcgaggggctgcaccagtgcttcaatcgagtctttgtcagcttttatctgtgcagagattcctaatacctgaagacatacacatatatgatttgagatgctatgaactggaattaaaaattccagctcatgtgcatgacaacaggattaagaggaaacagagcaagcagaaaacagcaacactttgcacttgtaaagaaactgatagaatttgcagctgcgaatcagttctatccaaggaaattacaagtgatccccaactcacatcatcaagagcttcagacttctgacccagctcttctgtatgctcttgcaaagttttctcagcgagaggaataatttcagtagttagtttcgagtattcttcaaaaactgcccgtagtttgtctagctgttgaaatacagagtcagcattggaagactccactgctaatgctttaagatgctcccctgtgcttgaagcctttaccctttgctgtatttgaaaagaaatttacgtactcaaataaagagacattccgttatttcagaagcagaaaataatttgaatcgttaaggcaaaaacaggagaagattgtgtaaccttcttaataaagctagcctcttcatcagctgtaaaagagcgctcgcagcaaggacaagaatgctcttgacgtgctcgtttctcaaaaggttcaaacatctgacgcataccatttgccatgttatattcgctgcaaacacagaccagaaacagaactatgcttttcagtgcaagagaagaatatattggaattcacgcaaacatacagggggtggggtatggaaacagtcgccagttttaaccacaaaccgtttacggtcatctcttttgtccttagccgactccaacaatttgggataagcatcaatggtaactgattcctgttttaaggcctgaagcttggactcaatgtatctctttcttgctgcataaaagtactcaagtcagattgagtgaatagatattttctaatcatccactgtacaccgaaaatggattccttatctgtctttaaatgtcaatccaggtacattgtagaaacgaaaatcaaataaaaggggtgacagatgacacattatattaacatgttctaataattggtaacactgaaaaaattgtcaagagcagtttattcacaacttaaggcgctagtcagagaactgaccaatagatatctaactttaaattatacaccagtgcttacattctgtatccttgttatgcttgaataggctattgtttacttcttgtatcttcatctgcaacatgttgacctccttttctgcttctcgggatttcaaactgaggtcatcatattccctttcaattgacctaaaccaaagagaaaacaaatacaaagaaatgtttgagatgtgataactttgaacaccaagtagcaagctattctcttgttttgagatgctgatcaagagatcttatattaataagtgattcattccgaatcatcaaaaataataacttaagtgaaaacacgacctcaaagcttgaactatttccctcttcatatccttctcgggtggtaatctccccttcagcactcctctaattcgatccttgcactcatctattctggtaagtagctttagagagtgaaaacaatagataaatagaaaaaaagacagaaaactgagaaaagttttggtgagtgagatcacatctttttgtgtttcttcttaagattctcctgttccgtcttctttaaagacaatttcactctatcctcagcatcaccagccataacgtctctttctcgattcagtgtcttgattttatgctccaagctgtatatttcatgctgtttctgttctattttggattcaaatcccctttcagaattctgttttgtctttctctcaagctcaacttgctgtgcaaacgcagatgatgaaaaagtaaggcacatatagcaagggaaaagtcatcaagaccaaaatcatgtaagtaaataaagggacgaaagcaataccacttgtttctctctttcatcagtttgtttaacatccacagtggaaatttcgaattcaaatgaatcacgctcaatttctttctcttctatgcgttttgatatgcccatctgcataagtcaccatcaaaagtaaaagagtgaaaacttaggctcgttagtggaggatttgggttagagttccaaatggtgaacaacaccttgatttcatctttagctcgtttctgagcttcgatgcttttccaacggtcattagcatccatatagcaatcccaagccgtacttagagcagtttcatttgatttctgagatgacaatcaaaatctctaaagatgtcaacatatgcaaataatgcaatatacaattaaatttctgtagaaaataaagaatgtgaaccttcttatcgagcaaatccatctcaagttcacccagtcttgattttattcgatttgtgagattcaaaactacctcagtactgaagggggtactaggaacatttcctaaattgtaatggaaaaaaatgttctggatggtagaatctctttcattcttcagcagcatatgagcctatgaaaaatataaagaaaacatgttaaatcaaatagagcagagaactcataatattttactatgtggtggctttttcagatttacttcagcttctgtttgtagcttgctgatctccagcatatagttagtttttgcattgtgaagcgaagaaattgtagtttctgtgtcaaccatctctctctccatttttcgaattttggtccccaaaagagcaagtctttcttcaaacttgcttttccattctttcaattcttcaatagtatctgaacaacaaatattacaagcaccaacaaatttaatctacgtgaagaaataacaaaatgtgagatacctttacagaaaggcaaaagtaaattcatacaaatgcagggactcaatctgtaaaacggacagactactaaaaggcagaaaggaccttaacattgtgatagtaaaagagaaaaccttcattttcctcaggtaatgctgcatactgtctctgctgctccttaaacaaggtgctcctttccgcagtttttattgatacttggtcctggagctttctcagatcttttaacatcatttccttattatgaacttcagcatcaactttctgaacactggtttccagttccaacatctgaacttttgaagattctgtcctttcttgatcttgagcaatgctctcacgaagctgtataggaattatcatggcataagaatagcccacacaacctaagaaatgcataccatatgtatacaatactctataattactttcagaattaaaacaatcgacgttagtgttaattttgttcctttgacttaacaaaaaaaaaattatgcgtgagagaccagggtcggatactgaaaaagaaaagaaaaatcaatgtcaaacaagttaaagtctaacataccttataagctgcgtctttcaaggtctgcagattttccaattttaacttgaaagtttttatctcctgagcttgatccttgtgaagtttcttaataacttccagagcctttgtatatctgtttcatgttaaacacacatgttacattttctgggattcggtttcttctacaacaaaatacagcaaggaactgatgatttaagagaaatgttggtggtgagccagaaactacctggtggctgagaaaatatcatcaaacttctttttcaaagtagaaggatcttgcagtggccagttagactcatcctgatgcacaaatatgacgttttctaaaatagcttttgacacacccatcaaagctggtatctccctatccatgtcagcgcatctgtagctgagacatactttctgcaatttgacaatgtatgtggacaaaataagaaagagaaatgatctagatggaactcatgcaaaaaaatggaggaataaataacaaaacaacattagaaactccaatgaggctgtgcgttaagactttcttcacaaaaacaaggtatcaaatcattctatatgcagacaaaacaaacgttgtaacttgtagggaatatagatagtctaacacttagctcgagaccttcaaaccaaaatcaagatactaatacatagctaaaaaaagggagagaagaaaccaaatgaaagattaataacaagagataagtgcaacctctccagtgtgaggattaatggtttgaagcacactctcaatagccttgtactccatctttgaagccttttgcgtcaactgaaatgaccttatacataccacatccttccctgcagctgtcttgaatctcagctttatttgtgcttttgtctccgtttctccagcaacctatatagtaggaaccaatgaaatttcaatctgaatactactataaggcgaaatcgaatcctgaattccacattcatcaacaacagaaacatgaaattaggtaagaattgagaatctaactagagacttaccttagggtcatgaatgaagctatgaccagacctcgcgttcggtggcaactctccggtacaagacacctttaaacactctataatcgtctgcaaaaatcacgaaatagccacaaacttttcaattacggaggcgaagaaatgggagtgaactgaggagaagagaaaaggtttaaggaactttacagtttttccggctccgttagcgccgacgattagggttaaaggtctgaagaaagtaacaacgttcttattttctgggtcgaagcttcttatacccttgatcaacattttatcgaccgtactcatcttttaccttcagcgattacagatatgaaaaagtggaggtgataagttacggagaaaattttggtgacacaggaaggttaaacccataaacgagaagggttttgcgggaaaatcatgaaaactcgacaatggaagaagaaggaactggaaattggaaaaagaagacgaattgaatcgcgagagaccggtttataaacagaatcgaattgaaccggtgtagtattcgattgagaacctccggtcgtatacagtttcttccttttggggttagattagaagcgtactaaaatattttgagtattttgaaaacaactacaatttcagggacttatcttttatttaatacaaaatagaaccaatgcaatcaaaagtcaaaaccttgccaaaccgatctacactatcgctatttccttaaaccgaagatttaagaaccaagtaagccgaaccgaaacaaaatcaaaatccggaatacacaactcctaaagaaccatagattactttgtaagaacgtagtaaaagaggcataattgtcttcaatagtattaaactatatacatgtgtaactgttctctgcttatatgatttttgtttcactccttgttcttggaagagcggtcttttctctgaccaccaagaatacgtgaaatctgcaatcctctgctaaatgcttggttaaagagcattcttgtctgaaactcagacacgaacgggaaccaagccaggaacgctaccggagtgaacaaaagtaaacccatgagaatctcatagcctcgagccagcgtcctaaccgatgaccagaatcctagccgttgaatcagaggcttacacgcttgtgcaatcttgaaaagaaaagagagaatgttttgaatgaattgcagcaactatctcagaaacaagacaaacacaaagacgtattaaaaacaatttggaggagtttaatggaggaatgagaacttacgagtaacattccccaaccggttggcatgaaagcgagcatacaaaggaagatgtccttgggtgttaaaaaacgaagagctaagaaagtaatgagaagtccaagaaatgtgaggaacacaaaacccttgatgatcctgaagagaagctggaagtttgtgctgaaccgttgtcttcccacacccagaccctgtgattagttacattcagtttagtaaacaaccttgatcgattaaaagattgttggtatctcatacttaagaaacccaaaatgtgaatgaatatgttcatggtgatagttatcatacctttacaataagtaaaatgaataagatcacgaaccatgaagctccataaatctgtgaaacattgagaatcaatttattaaaaaccaagagaattcgaaaacaagaagagcaacatgagatgggtaagagctctcacccacaaactttgattttcctgtttaaaggtgctgagttgataaaccagtccgtactgaaagatgaagaagcgtaaagccaaaacaatctcgaggatgataccccgttttcccgagtgtcgaagatgtcctatttccttctcccaccaagactcccaactcttttctggaggaacaccaattccccctcggttatatatccatttattccaatctgtccaatcatctacgatcttttgccactcgaaaccagagggattgaacaggaaaggagcaaagagccaagtcaccaccatgaaccatatcgaaacagtgatcagaatatatgtaacaactcctctataggcatggccaaatatctgatacactagcaggagtatcatcagctcaatacccttcacaaaatgactgcgcgagtagaatctgtagttttcagcaaatttggcatggaacaccacaaaaccacgcccagtgcctctgtattctgcgccgccatgaaacaatgttcgaccatagtaatgagtttttgtccccagttggaacgtgaaaaacacggaagcgagttgtaactgcatcagtacaaaatcaattagggcgttatggaatcccctctcaagacctatctccatcatcataggtaaggccatcaagaaaccaatctgcacaaatgattgagaagcaagtgcagcttgaagaggcatgttggatcgaaaagctttctggttgctcaatccttcttcaagaccactaagaacgagatacagccgtccatatagaaatacatagaccgtaagcacggttaactgtaagaaagacacagataatgtttcagactgagataaacttcccatgtatcatactgatcgtgagataagataaagaaaaaggaatatgacctaccatagtactgaagtagaacccaattgtagtgaaataacaagaaagcatgcggaagaaatcaaatcggtgccccagcctatataggtcacggcttagagtttgctccccatttccgttagcgatctttgcctcaaacattgaaatctggttgagtcctacatctctccctttaccaacttgtatgtattcatgatgagtcacattgccttcacgaagagtagagttgaaacctgaaaatagcgaaggtatgagagaacgaaacaaaaacgtatggaaacagatcataatatgtgtcaccggagaaaaggcgatgaagcaagtaccagcaaatatgtcttcacttagattgataactttagaagctttgcagacaccacctctggtaaggtgaaacagtcgatcaaaaacatctggatgaccgtaatggaatcgtaccctggaggagtcaaaatgaaagttacaaatccaggtctcccttcatagaattccaccacgagatgtaaaaaaaacttacttcaaggggctagctagcaccctctgcccaatagtaacaaagctgttttcctgattcgacataaaccatgcaagagaagaaacactgccacaagaaacgagacgagtaggatatcattttgtgcaccaagatcaaattgactgtctaaatggcagtacaagattgtactattttaccttcccgtgaaaatatgctctctaagtccaagtattgtaggggttcttacgcctccatgcttaacaagaaattcttgaagcaagttcctcattttgaaagcttcctccatgtaattgtcctgtttatcgaatgtttgaatcaacattttaactaccggcataaagtgattaactaggacattcagcccagaaaaaaatgaaaaagttaatagggcgcacctggttcatgtctattgtctgtaacccttctccgcgagtaaaaatgatagaatggttctgattctctggcttcccctctcctagtattgcaggtcctggtagcttaatccggtatatgacctgcaggaagaaatataaacttaagtccccaaaactagaacaacgatatggccacaaatgaaaaaagagaagacacacacacacaaaaatcagcaacaagaataaagattgaaaaatcctcatatgcttatactctagagcctcgcttacagaaataactgagcaccaaagtttaaagtattctagagcattattttaacttttgtacctggtctagtgtttgcacagattcagaagaatccatagatttggtctgcggagcagctttgacaagggctgagtagtaaattttttcgtctgcccctttatagctttctttatgtgtttgctcaacctcgtcaatataagcaacacgtagagacgggtacctgtcacagagaaatagtaaggttaactaatgcatataagaaagacataacagatctattgaagaattatgatgagagaagacatacgtagtcataagcctcaatatgtccttcgcacgttggtcaccggatctcttctgaacactgtattgttggcatgaaaccacaaaggtaaatttcatgtcagcaagtgcttgacactgagcccagagcgacgttccactcttcgatgcgtcttcactagttaactcgagagccttgtaccctttcattaattcttaaaacaaaacaaaacaaaagcagttttaggaatgttttcacagtttctataaataaaagaatcataacaatgcctggtaagcaccttcatcctttgccatatcaaggaaggcctggagctccaaagcctttcggtaatacatcatgcctcgcactggttgattaaaatcagaaaaatcctacagctaaaacgtgaagcagagtgtttctttgagaaaggaaatgaaaagccacataccagttttggtcagtgtttggcctctgtaagatgcccacagacgaagttcctcttccaactcttctcttgctctgagttcttcttcgctgccacatttcacgcgttccaaaaagtttgtccactcatctgaggtaaaccaccgagtcagtttatggaatagaaattcagaggacaatagtagtggcacaagaccatttggagacagaagaaaaagtgaaacctggaaagatcttctgcaagtaaaagagtatagagactccatcttcattttgcttctccaaaccaaaaatggagaatagaacatcctctgaatagtatggtgttaggaccctatggaaaagcaaaaaaatgtatagctattagaatttgtacatcctcactgcttgtaggaaagaaggaattaagaggcaaataaaaagatttatcatataactgcaatggagtttcttgcaaattgaaaaggaatggaacttacgaaaaggaaagcatgttgcggattttgggggcatcaggcatttccatgaataatgaatttgaaaagaatgtaagtcgccttcgagcttccaagttggatggcacatccatagccgactctttgacagtaagtaaaagatgaagcctcttgatctgcacaataaaaacgtaaggagatagataacttagaaggccctcaggcaaaagagatcaaatgcaccagtattgcagaagcataaatgaagcaaatagatgaattttaaagaggagacttgctttttctttccaggcttctgtctgagagtacactgggaatcgaagttggctgaaatatttgcgctgttgatgaagaggagtcattacgtcgtacttgacataagttccattgtgagttgactctagcatgctatggaaagaaaactttaaatgagtatgcttcaaacaacattgatcaaaccattcagcagaaagcctaactcaaattatcttaccttgggacctcttcgtccattatgtctcttgtcaccacttctaacatgttcagcaagacaataacaatttggtccttgtcctcctctctgttttccatctgtggcaagtagactcagctcagttattttcttaaattcatgctaaagttgcagaggtgttcaacatggtaagggtacaagacttaccagatattcaattagtcgaacaaattgaccatacagatcgggaagagcactcaagttcaagtcctttattagtgtttctttctctatatgttcatcaatcctggagaagatttcgtttatgaccctgcacaagaaaagtaaattaggaaattgaaatgtattttctgagttaaataaaacacaagttgaatttgtgaggaaaaccctataaacttactgtccttctcgttctccaacaaccaaaaagtttatgagatttttaaaagaggcgtagcactctctaaccgcacaagtcatgtaactgtcgacactcaatctcttggtcagttcacgatcttttccattgctatcttttgccatatccaaagctattgggatctaccacatttagcaataaataattaaaataacaccaaaaagccaacctatcatagttaagacaaagataaaaatactcaccttactagccagcagaaaaggtggccagcggataagatccagatcacggtcagcccaatatggcacaagcaggagttccatttccctgcatagtaatgaatgttttcactgaactcttctccgattaaaaggatttcaaaatcatctaaattaaaataaagatgaatattcaaaggcacactcaacctatcgctaatcaaatcctcctctcggaaactactgattattttgttccacatctgagcaaatcgtgcggcctccttgtctttactagatggaacctgcaattaccaaaatatgacacaactttaaatggagctctctccaaaaaaaatgattaggagaccaaacgtttgtttactaaatattgttccgtgtcatttgttttattactggtataagagaactatgctgacctgatcgaacttgcgagtgaaggtcgccataatcccctttttctttggagtttcgctcttctcatttggaaccaagcaagcattaaaggcctctggtaaggactgaaatctagacctcaacattcctagagttcggatctgcaaatgaaattaacttcttttcagacattctcttgccgggaaactcaagaagtgagagtatgcctcttgatcatgaacaaactaagtttgcaaggaaagtaagtatgaacctctccaagacgtcgaaaagctccatttaaacctcccaccagagttgaaactatagcataccatatttgagtgtccatgaaataaacctgcatatgaaagttagcatagataggggaaagaataaaaaggaagcatacggcaagaaagatgtgccgactcacaagaataacaggtgaccagagagcgatcaccacacccatattactcttggctgaaaaaaagaagcaaaaccaactagattattcagtaagaactcattatgcaatgagataatacctaaatgctattaagcattaccgtgagggaaaaactcatgccagcggtagactgatatatgaactcgcataatgtctttggttggtttaacaagaggcttaatctgctttgaagatggaaagtatgagaaacgtgtatatttaacaatgtcactagaatttctcagtggttgttagtgaatgctccttacatatttctcttgttatactataaaacaaaacattgaatatttgtgaaattgatgtacctctgcataaaaactgaatgcaagctttgatattagaagtacaacccagaacatcgtgtacctagatatcatccacgaaaccttgttaagcagtgtggtaagaacagtcaaaatttcaacaaccatagcatgcaagttttacactcttacttgaaaagtgacaatgcactctcatgcatacccctccctatatagagtctcggctgtaacaccaaaaatagagattagtcaccttcttaattagcattcatggactggcgatttatcaagataagatatatgaataaaatacctgagaccaccacatcataagcatcactattttatagtcagacctttcaagataacgtcggatgaatgggaacgcgaagagcaatgtagagagcatatttggggataagtagataagaatgacaataatgaaaaaggaaggtgaggaattttggtgtcccccaaaccagttctttatggtctctgcaaaaccagaaggggtcttccagctgtatgcgtaagttagtggcatgagaaccacccagattgcagctgcaactgccttgaagataaatctgagcttcacatggaatgacatactatgtcttgatttccagcttagagctatatcaaggacagctgaaagttgcaaacattcagagaacggtaagaaatgatttcccttcacttataataaatagtttcttacagaaatattaaagagcaaagcaagaaataaatgtataaggcacatatctatgaatgagatgaatatataaataattgcacataagttttcagaaaaattattaatgatccgcatgaaagtggtatataagttgacgaataatcaccttgtgcaagctttaatatagctgccgtaatgaagatgctcaaaacctttaggaagacatcaccttggaagatgccgcttaatttcccagatccattccaagcaattatgatcattgccttaaaaagatataaatacatcaaattacatgacaggccaagaaaaatacaagtttggaaattgaatttaaccatacctgcaaagacaggatatagaaactccacattctatcgaaacttctaaatatatgccagaaggagcgtatctcaacaaaattgactttgcccatccatcgatctccagtttttggtttattctgcagcattgtgaacatcaaccatgaaattctagatacacaaaactcgaggaaagtaaatggtattcttctatgacttctatctaacgtttctcatgacttgttaaattacaatttgaagttcaaaaagttgtatgttcctctaacagacattatgaacagcttaagctggttgatcgaacttaagtttgatattaaacacttagttaacaaatttgtgttccataagacatgaagttgcaaacagttttgaacaaccatcaattagtttcttctacccatacctcacttctgtcaagtcgaagttcttccgctgtctgacaaaagaaatcagcatcagctcgcataggccaccctaaccgaaagcaccgaattgacctaccagttaaaatacatggagaatcatcatgaagaaatgtaaaagacgtgtatttccagtctgttacaagatgatcaatgaattgtaccaaaaatattcattcaagtcgtcatagtttctccactcagaatgctttgattttcctcctctacttctctttgcttcctatagtgcacagatatgaagatgaaaaaatgaaggaattggttcagaggaaaactaaagaagacaaaatgatcaagactgaaaaactgaagcaaccaacctttgctattgtcttgtatataggagtcactactttttgcaggaaagcttcgtcttcaccaccatatgccggttttacatgctcccctgtcattggactaacactcccagccaacatcccatacagctcaaaagccatctgaacaaattcagaaaatcaaattaaactcggagttagacacaagtagcaaaatactcctactctaaatagaaataagtattactaaatccttgcactggtttcttgccttcaaattttactagttgattactaggtatcagccaagatcaccattttatcacagtgcccttgtctaaattgaactgatatttttagagaaggacacaccacaaagttgcttaagagagatagggaagactgatgttttcacatacatggtgatatatatagcaaaggcattctggcaaaaatctcaggtttgcagcttctccccatattaaaagatagagtcccatgtatagcagtttccgctgctgaacctcttgttgaatcgtcggcaacctacaagcagggaaaagagagataactaagcacaaagacttatagtatccaatttatgtactacatctgtttctatattcctaagaaataacaaaataaattctcaaaagcaggtgttacaaggagatgcctcaccaaaggctgctcttccgacccaaatacttgcaccactttttgtagtttttgaaaagtttcttcatcactatagtcaatgcacgatcatccagctaaaggcagaaattgtaatttaggccgttagtgcagatacagaggactagacgagcaagaaaccctcatatccaagttgaaaagaatacatacccttggttgttgttcaggtcttggaaactgtcgaatgtggacattagcaagtaacaaaatcaagtgctctctttgatttgaaacattatctttctgccattttaaaggtttggagcacaatcagcacagggataaatcctcaatcaactaaccaaacaggatattcgctagcatcacctgaaaaccaaacatagtttgaagccagtctagcatgtcttcatcgagtttcttcttgtgaccagctggccatggtaaacccctagtgttacgaagtgcgcttactgtagcttgtatctgcagaaaagtgttatttattttccgtctcaaaagacaagtaaacatagaattgaaacagttagtggaatgtttggttaacctcaggaaatctcattatagcctgattttgactatcaggatcaaggggaagaatgttgtaaggcacgtagatttggcttttttcttccacctttgtgtgagcctccaaaatctaccagcaagaaaaaggatgaacaaaacccagtgagtcaataaagaatatcaaaattttttattaacagctttcatactacaaataatatcaataaagaatatcaaaatttccacgaaagcatgggataagatcagaagtaagagacttaaatactacaaaatataatctagaatcaggtcacctcatcagcaacttccacatcttctgtctgattaacagctttcaagacttcaaagagaacagcagcagtttgatatgcctttgtaagttgagcactacaagtaaaacaaatttgtattatgaatgagaatcacagaaagatagattgcaatagagataagacagggatgtcaacaaaccggtcagctttgtcagcggcgttttgcaaagcttggatgtatttcttgtagtagtgttgatagaaactttgcatttcgcgtgcatcactcttctgccttcctgcaagagttgtttcattctcctgcagaagtttgggatataaggcaaaatgacacataatcccctagcaagacaacggggtgaagatgaaaactcaagcagagtaaatgaagagacgatattcacccgttctaaccgttgaagaagcgcagtcttaaactggcgaacaccacgtccacttgatgtgggatcaagcctgtgtgccttctcaaacgcataaaaccgacctgatagaaacatccacgacgatatttttcaagatcatataagatgaccaaatcacatcaccaggcgatttttttaattatttcaactcacataagtaagcaacacgggggttactagcttcaacttcattagctacacgaaggatcggagcaatctccacaagagacgatggcaccacttcactgtccaacatagcctctccgagattaccagcagtttgagtccgcagaatccgcctttgaggcggaggcggatcaggtcctttcctttgagccatgatcttctagatcctactaaaaataaactaaacaaagaaccaaatatgtcaaataaaagagcttctacatcaccatcaagaacaaactttgacaactatatgcactgcaatcagataagcattccgacaaaacaaaaacatgatttgtttcactccgaagcaagatgagagattcactcctataaaatcgatatcatcggaaagagatactaaaagttactttttttagttaggccatacccaaaaagtagcagaagatgtgtaaagcacaaacctttatcaccaaaagctaattacccagaaccacaactatcttcgataatctacagcgaggcacaagacaatcctgagttcagaagtaacaaaggcttcaactttggaagcatcgacaatcttcgatagagaatcaaccaaagaaaaataatcgaaaattgatactattattaattaattccctccggaaacagacctagaagacgaatctatgtctcactcataagagttcagtgagaaaaacccctagttaaagttgtaaactttgaatcagattcggattagtaagacagagaaaaaaacgaaaagcaaaacccataagtttgcaaaataaaaaaaccagagatcaatgaccaatcacctgaaaagagaagcggaggaccacaagtagaatcaagaacaagtgatggagggagaagaagaagaagctatcatcttccccaaagtagtagaacaagagagacagagagagagagaattggagataaagatggggaaaagcaacgggaacaagacaggcgccaatgtctttgttactaattaattatgtatgtaatggtgagtcttcccactcaggaatgtccacgacaatacttcaccttccttattccaatgttcttatgctttaatcttctttagaagatgctcggtcgttctcctccttaatatgtttttttatttaacgatccatgttttttcaccaacatactgtacatactttagcttcataatataaaatcgaaaatgttaaatatatactccagaaagtttctttattaatctcatcgattgaaaatgggaacttatatataatcggaacatgaaatattagttcaatattctttgtacatttataaaaccataaatttgtgtaggaaatgaatccaaactttcttttttagtatttcatgtattgaaaaatgatattttagaacaaacttagagaaaatcattgcttaaaactgagttttttttttatatcagcttacatataaattaaaaaaccataatctttttaatcaatcaataatgaattgtgttattattttaaaattttaatatcaaaataatgagaaacaagaacttaattaggaaggacaaaacaaggtttgctacaaatgcatttgcgggtgaatcctttgcaacgaccgtcagtgaaaccttcgctaatgcatacttggcgacaattcctccatttcagacacatacccttccagtccaagctctttgcttcacacatttgttgtccttcaaccatctctatatctataatataatacattatcattattcaataaataattgaataataatataattataatcatataaacaatcaataattgacttattcttcaatatcatcaaatattaaattattcaagtagatgcgtaaaaccccatgcattaaatattaaaatataagcgtatattatatgttttagtaactttttaatattgtgagtttgtgagaaactagatttgcatacctggtgaagcaagaagaatggttaagaagaaaagtgttggaattaactgcatagaggtagtagagctcttcattttatttcctactaactagttaagcgatatgaatacgtggggagaattgttgatattgaaaattagcgtgagaatgtcgcatttatagtaaacatgtgcacaaagcttttttggtatatcaacgtatgcatacgataatgaagaacaataggaatatgtggaaaagaatctgatcttgacgaaaaatatctgcaaatacacatacgagaatattttgttgtttatatatatctctagtactgtactgtactggttaaagatatatgctaatgattttttctttctttaaccactatgaatagacaatctaccataagagaagagattgaatcaacatagttaaagtgggccgaggggactgatacaatgaacgtatagactatagagtgttaagaaaattacaaagtggtagtaatatcatagatgaatttagactaatgtgaagctagacagatatgcaaaaaaccattcctccataagttcttccaaaaaaaattcctttataatgatatatttgtagtttagattttggtgtgttttgacttttgagtttatatctttatccaataaaacaaagttacgtacaaaattgatcaaagccagtcacacagcctaaaattaactttagattacattatcactaacttgcttagataggaaaccatcgttttaatcaatcaatcataaatttggttatctataaagttttaacataatatcaatatacagagaaataaaaaatttagtacaaatgtttggagtttggttgttacataattcgcagattgtaaaatttaatagtttattacattaaacaatgatgtaagcacagttaataaattattattctaatgacatatccgatccagatgcaatctgaatttcactcggaccagtaaatttaccaattgaggtcggtttgattgcctataaccggtaaccggcgagaccgacagatatcatcagaaaagacgaaagagtttcatgttttttttttttttgtttaggcttttagccaaactctctctagtctctctctctctctctacttgagagtgccgtctccattttctcaacgtagtcgtttattttgaacaaagactctctccgtttaccaaaggtcatctcttttcttcctccttctctcacttttgattatattttctgacttcctcctcctttctcagaaattctctttcgatcttctctacagtgttgttaacgatgaggaggtgcttctccaaaattactgattgccacttgggtttcaagaattccaacttcttattggtaaatttcccaactttactaattctcacttctctgctacaatgggtttcgatttctcccactcaagttggttgctttttcgaattgatttattcctgtagctactagtatttgcttatatagtgtaaaggttagggatttaagagctgaatgaattcattttgtgttcttttatttagagaatcaatgcttatttggaattc

SEQ ID NO: 319 - DNA, 100424 bp, Arabidopsis thaliana
aagcttgccggtatgaatctcttccttggcccttacgtacttcccaagtgaatcatcccacacatcacacgccatatgcgaaactctgagtttctcagcatcctctagaatccaaaatcttacctcttcattggaatgattctccatacggatcatatcgctagacaaatataaaagagtggaatagtatggtggcgcgatatgtgatacttcgtgtgcttgaatgaattccatcttctcagacctaacatcgaatttaactattattgactgtgaaaccccatagtatatagcaccatctatgcatatccctccatagaccatgtgataagtttctccagtggtgttttcaatctttctccactctttttgttgagaacttagcgtgaaaacgaaatattcctgatctgtatctgttctatagccgtcgaacatcatcacaaccaacaacactttgtattgatcttccactggatcgtatccgagacgtacgtgcatgtaattttcgttggtaacaacatcgggcagttttactatttgtctcgtggttggattacaaaccgcgatcgatgaaccacgtgtgcaacaaacgaatccgttgacagggggagatctgatgtagttgacgaaattcgagatcgtcatgtcgtgtctggctatgcccggagaggattttccgttgtcgtgatcaggagctgagtagatgaaaagcttgtcggaatccaagtgtttgaaagtgaaaaggagacgcggccgtgtctttgacctagtcaggaacgagtcaacgaattctttactgcggatgattgagaaccagagctttgatacggattggaatcggatatggatttggtcggaaggatcgatagtatctcgaaggtgagatcaaaagagatggtttttgtggagtttccggagtgatctaggttacgtgggggagaagattttgattttttcacaacggaagatctaactagaagaaaagcttctttcaaacaattttctttatataggaaaactcttgaacagtctaaactctaaagattcgacttcagttgaacagttgtgtagatcactcaattaatcaccaataaccataaagcttctccgctatctagatcttgaatctcatcaatagctcctaaacctaggattaagctaaagtatatattgtaagatagtgaaattctccttgaggagatagctttgcattgcactcaatatatacacggtttagcaacgatctttcctagattctaggtacatgagatattaacaaagtctaacaaagtcttatctaaacttgtaacaaacatatcgagacgaaatattgaatggaatattctatctcctaatatatataggtaccataaagataaggtcaacacaatgggctgaagttaaaaacataagtttaagatttcggattttaagaataataaagcccatgaaataaaatatatgatagttttcaaatccttttgtaattagaggcccaaaatgttattaatctcttcaaatctctaatatattaggtccgactcacagtcacacttaatcgagctagattcggtaaaaatagtgtgacaacgactttttcttacaaaaggatctaattaaccacataaacttctgaaatcagcaagaacgtcttctacacaagtacgaaaactatagctttttaattttgaaataaggaaaatgtaatgaaaaatgatatattgtacttttaaaagtatttctatattactatattaaagtaagaaattaatatagtaatatggtcaaatgaacctggatatatatggaaagcacttcaaggtaaggtgcgttaatgtgaaagaatccaatggatgggcaaaatcgagggaattgtatgacaagttacaacaattcattgaaaatgttcaacaataatatattaaagggcaaaccatattattttaattaaaaaaaaaaaaactgaaaatcactaataggtcaaagttgaaaactaattattatatggcccgatagtttttatcagagttaacaacttttgatcaattctattgacactcttcataattgaattacatataattaacgtacgaggttttgagctacaacttaaatgtatgtaacaaatttggtgggacttagatcaatctctctatcataatcaagaataaacaaattgcaaatatcaattagtgatataattcaactgatgtaggaaagactaagaaagtttaatttaagtttataggttctagtgttctactaatgtggtataattttacacatcctgaaatgaaaattaatatatttgaaaacatattttatattgaaatacatatttctaataaggaatagagaaattttataggcgaatttttctatgtaactaggcaattattttagttaaaaatttaaactaaaaatatttacaccaaatacatgtggttatcattcaatttttcaaataaagaaaaatttaagcgtattcaacgtcatttaattctttgttttgaaaagtaaaaaaattgcaagacgcgttgaactcgtgaatacatattatgtatatacgacaaattcattaatttgccttatttttgtcaacaattaacattttcaattagtagaactgtaatgaaaaaagttagggaatcttttaagaggagtgttctaatacaatttgacactttggaacaattttgctcttaaaaagaagtaattgcttataagactcaaactcttatgataaaaatgttgcccatatgaaaagtgatcatgccaacgtaattttgcatgaaatatcgcatacaatgacttctgatttatctttctttccctctacccttgaatatagaataaagaaaatcattacattatatattttctagatttaaaataaatgtttttttttaaaaagagcaagaagaaagacataaaaggcgtgtgggaaaaagaaaaggagtaagacaagtaaataagagaaaaacgcgtctttgaagagaacgtccccattccattaggcatgctatgcgcggccgtgaaagaagctcactcctctcctttttcttttcttcttctttaatttacaattttaaatctctaatcatatattgtcaagattcaagagatatataaactgatcaatttgagatgttacttccatttcttagtttttgatattcttagcttagttataattcgagtgtttgtctattgtttcataaaagtttataagtaggtggaacaagtcattttcaattggattctctgttaacatcaaataaaacggctttgactaattactatggattttattgagaacgacttgtaaacataaacttatctatgtcagaaaacaaaagaagattcaaacaaatataagactgagacaagaagaggtctttgatcaaacaaaaaaaacacaataagaggtgataaaagtaagagatataatttctcataatgatctcatcacaatttttatcaactctaatatatataggtctaaagacagacaattatctaagtctttctgtaatttcttaagaccactctgtcttttctctaaggaaagaccaaagagacgagaagaagacaaaacaaggcattaatagtttaaataaagcacgtaataacaacaaattattacgtaataatttaacacaaaatttatatttcttccaaatatacaccaaacacctctaaaaaaaaattcacccttttcttctttttctctatatatctaaaatcacaacacacaaaaatactcatatatacaaaaatatatacaatatacaaacatcgtatatatcaagtaacagagagaaaaatcttttttcttcctctccttgatcggagggtcgccgtgttgaaaaggatggatggtggtggagagacgacggcgacggctacgatggaggggagagggttgaagaaagggccgtggacaacgacggaggatgcgatcttgacggagtacgtgagaaaacacggtgaaggtaattggaacgccgtgcaaaagaactcaggtttgctccggtgtggcaaaagttgccgtctacggtgggcgaatcatctccggccaaatctaaagaaaggatcttttactcctgatgaagaaaagatcatcatcgaccttcacgctaagcttggaaacaaatgggctcgtatggcttctcaggttataaatttttatcataaatcttttttttcttatttcttcatttattaatttttgttttttaaattaatcaccttatttgtttcttcaattcaagaaactagagggctttaaattttcttatatgcaatttttttttcctagttaaacacacaatttgcatgattaaatgtgtttgaactttgaatctttctttctcttggcatgattaatcttgcttctctatttttttgtttgatgcttataagcatgtttttttttttgtttttgatgtatatagttacctggaagaacagacaatgagatcaagaactattggaacacgaggatgaagagaagacaaagagctggtttgcctttataccctcatgagattcaacatcaagggattgatattgatgatgagtttgagtttgatttaacttcctttcagttccaaaaccaagatcttgatcataaccaccaaaatatgattcagtacactaattcttctaatacttcatcatcctcgtcttcattctcttcttcatcttctcaaccatcaaaaaggctgcgtcctgatcctttagtctctactaatcccggcctaaacccgatccccgattcttcgatggattttcaaatgttctctctttacaacaatagccttgagaatgacaataaccagtttggtttctctgttcctttgtcctcatcatcctcgtctaacgaggtgtgtaatcccaaccacatccttgagtacatctccgagaattcggacacaagaaataccaataagaaagacattgatgctatgagttatagttcattgcttatgggagatcttgagataagatcgagttctttccctttaggactagacaatagcgtcctagagcttccttcaaaccaaagaccgacccattcgttcagttctagtcctattattgacaatggtgtccatcttgagccaccttctggcaatagtggactacttgatgccctcttggaggagtctcaagccttgtctcgaggcggactcttcaaggacgttagggtttcctccagtgacctatgtgaggttcaagataaaagggtgaagatggactttgagaatcttttaatagatcatctaaactcttctaatcattcatcattgggtaagcacataaaatttcccatcattttcatttataaaattctttttgttataaccgatgattttaattaatttactcaaaagtagtatggatctttggtagtatcgaagatatctactggatcttagggctaattgactctttcattttaaatagtgtttaatagtacataacttgggttcaatgcaacaggagcaaaccctaatattcacaacaagtacaatgagccaacaatggtaaaagtaacggtggatgatgatgatgaattattgacgagccttctcaacaacttcccttcaaccacaacacctttgcctgattggtatcgggtgacagaaatgcaaaacgaggcctcatatcttgccccaccaagtggaattcttatgggaaaccatcaaggtaacggcagggtggaaccacccacggtgccgccttcgtccagtgtagatcctatggcctcgttggggtcatgctattggagcaacatgcctagcatctgttagtttggaacctgcccatgagcaaaaatcatatttctttgatttgaaaaaaagagaaagctaattgtgagcttaacttgtgtttaatgtgtaaaatcttcttcaaagtgttttcaacttgggatgtgctatgaactgtatgttaacatgttttcaaggaacaaaagagaaattgaaagagatgaggaatgagcatataattttcttttgggttaaagtcatggtacatatggatcttatggctgtacaagagatgtttacaagtaaaagaattgcattatacaaactgatagtttcttttatttattcattttgggacaaaacctaattttgcatttgattgttgtttagatttatcagatcctcttacacagaattttaaagttcatcatctcacaatcagttaagatttagtgaagtgatagtcgacatcctttgttttactaggaaaatctctatttgattttaaatgtcagatctttaacaatggagtagtttagattcacgactaggccacaatctcttggatgtgtacttgacttttatttaggagaattactataacaaacgtaagaaacaagtaagagctcgagagtagaaaatgggggaggagaatgtgattgggcagtgaaccaactagttgcatccattgccattggcttatgtcatttgcatattatttcacactattccaagaaataatttccttaaattgcggctcccaaagaaagaaaagataataattatgtatgcaagtaggtccataacatattttttcttatgaggttccttaatctttgtacttgcaccttatctgagttctgacatcacactgcagttcttggatcagaagtctctttatttctacattttcactttactttatctggatatattgatgtcactcactctacagttttctttcttcttaagttcctcaaaatatagtaataattccttctctaaaatgtcatttcatataataatactgaatcaaatagcacaatgcgagaaaaaagtagtactaaaagataaaaagctgaaaaagcactcattccaaatttagcatcaatatgcaaatgactacagatgctatgaaattctgaatctgacaagaaagtcagaaactggccaagcctgaaaatgtcagaaattacattctagaaactgaatacagtttattccattcacgaccatcgacaaaatcatattaatctgaaattgagtggaaaataaaaaaaatacaacaagaaatcatcaatcatacttgctcaccaacacacactacatcaaaactatacacacaacttaagaaaaaaagactacagattaagatttaagaaacaagaactgtggaaattgaattataccaccaaaaaaaaaaacttatggatatttttcaagtggctattgtttttttatgagattgcattgaaaaacaaacacacttagctttcatggcttccacttcactcgcatactctctgaatttatattcctcctgctgtttaaacgttggaggaatcttcccttcgctgtaacattggttacagaggctaaaccctgttttcacttccttaaaccgagacccgataatcggatatcggcaaactgaacaaacctggttcccgtgtcgattcctatctcttgtttcgagtttaaaaacagtcgacatgataccaaatccccactctgaatcatcgtacatctctagaaactggttgaatgttaccgtcgaagtatcatcgctttctccatgaacttctaacatttcactcattccttgtgatggtatgtagatagctctcaagagtttgatgtatttgacggcttccatttttgtaatctgagagcttccttcgtttaccggtttccaaagtagcgcatcaaatgcaactcttttccttttgtctggatggccaccgcataaaggagcaatcactgcgtaaaacattcccaaatcgactcttcccgaccctgaatcatcaagaaccgagaggattttctcgtttatggccttaatagctccttggaaagtttcaggtttcaggacattaagcagacgccggagaatctcttctaagtttggtctccttatagattttgtgggaattccattgccggaataggatacaggaacattgttgtctctcatctctcttcttaatgcttcaacatcgcatttccacagccttgtgactctctggaaggctctaacttgaagagctatggctaaatctggccttaaagtagtcttctcgcctaccgtcttgaatttggaagattccacaacaataaacggaccttcttcgttagcactatttccttttttgacctttttcttcttctgcaactgtttcagatgagataccgcatcgtgcaactcaactcggttagtcattttcagggcctcctttaaagcccttttagcttcttcggtctctccagcacccaacaaggacacagccttgttgagttgtgcacgccaatggttaggccacaccgctaaaactctagtgtacatctctgaagctctttgaaacctacccaaatccatgtaaagcccaccgaggttataaagagcatcaacatgaccaggtttcaaatctatagctctctggaaaacctcaatagccctctcatcctcccccattgcatgaagcgacgaagccaaatcacaatgcgcatcagcataatccggtttcaaatatatagcttcctctaaagccttcacagcagctctatactctcctacaccaaacagagcactacctagaagcttcaaggctctgtaatgcgttggacaaagaatcgcagcctctctataatactcacaagcactcaaaaccataccttcaccttcaagagagataccaagattgacataaatctgaggaagcaagtaagcccattgattcccaccagactccgcagcttccaacgccaacaagaactcgtctttcgactctttatacttccccaatacataaagacaattcccagctttgaaatgaggtctcacatcagtcggttgcaactcacaagctctcttaaaactaacaagagcttctttaaacaactggtgctcatacaaaaccttaccaatcgccatatgtccatcaaaagcttcttctcttgatctagcaccatctgctttacttctcaacacacctaattccttcacaaacactccataatcatgactcgattcttcccaatagattctcttatccgaaatatccgaagacggtcctaactctctagaccatccagcttcagaaaacgcatcaacattattattatccactttcaatttcccatctttctcctgcttagacttcaatctcttaaccaaaatctccaaatcatcaacaagcttccacgtctcatcgaaaacaataccatggttcggcgaaaccgcccaagctgccgttctctgctgcttctgcgcttcaacagctctctcatcagtaatcgaagatgacgaagcttcagaggcaccctttgtctcttcgttaaactcaatccctaaagcgtcgaaatcacgatcaacatctccagcaccgtcgtcgtaagttcggagaagaccgtcaaaggtcaaacctttatctccgtcgatgaattcagcgtaggttcgaaacacttcatcgagaattgcgcttatctgttcgtcgctgaatttaaccctagggttcacagctacgacgagagctgacatctcttcacggcttaatcctccgtcgagattcccgtcgaattgctggaaaattctcttgactttctccgatctgcttcctctcgtcgtcattttttcctcaccggaaaaataaaaatccaaccttttatctttccctccccacaaaatctaaaagtgagaatccaatgtaggaaaaaacacgaaattgaacactaattacggatcaatttcgaagctttgttgagagaagctacttaatcctctggtttgtattgtgaaaaaaagttgctaaatttaagaaatgaagaagaaatcaaagtggtacaagagtccgagctgtctatttgttgtctctctgtgtcttaaaaaaaactcagagatagtggacaggagataacggtgttgttgtactctgctgttgtgggcttaactctatcttttattattttgattaattcttacgaaatatttgtctttctaattttttttttaaaattcgagaaaagtaagtacaactatataaatagttcaatagtcaataccaataaattgaatatttattgaagaagtcaattctccacttgtaattagaaaatgtgatagagaagagataaaatgacgcattattggctaataaatgcgaaataaagaacaaaccttgatattagtttaatcaattcacactaaccttgatgtggtaatcaagctaggttttatttcaagaaattcgattttacttttttataaccaaatttgaagctaaaccagagaaaaatttcaacattactttgacaaatccttcaaactattgatacatcctagtaaaccaaattcacaaaccgaaccggtttggatcaagttctaagagaagatgaagacaatggaaacctgagacgaagcttatatatttgctaaggggtctactagtttgaagatgatgattatggcatcgttctggtgattcttgctaggcaattatctttgggtcgattgtgaggcaagaacatcaccggacatccgggattgctcctttccaccctgtgattatgccattggaaacaaaacattacgattctgcatgcagagtgataacttgaaagctgagctatatacagagagagaggaagttaccggtatttgaggaggaaatgatgaagaaaaatggaaatctcgagcttggcaagatcgtttcccgggcataggtggcttcccaaaccaaaaggaaggaatgtgcctgcttttggtgtgtatccctgtagaaggaaccagacaatgttcagatacttttgacatataagagacggcatcaccaaatacagttacaaagacatttcattgtagaatgcttatctctacgtacctcccatcttgaaggatcaaatttctttggatccgggtagatttcagggtccaaatggacgttcctaaaccaagtcagaaccttccagccttttggaattatatagcctgaaagaagagacatgagaaatgagtataataaaaaattaagatgatttaccatgttccatgtaggtaatgagtatactgattactgaccatccatttggacatcactctttgcttccctgaaggccgtcagagagaatgtaattactcgaagggtctcatcaataacctgataaaaagctctttccatcagtaaaagactgtaacaactcatacaatgttataaacaccaaaaattacgttgcaatgaggcagaaacttgacctgagaaagatacaccatttcacgtgtctctttaagcgtcaacttctgtcccggtgctctcttttttacgatcctctcttgttcttcctatggtacaacgaatatcacaactcaagagtataaactgaaattgtgaaacatatcttctaatttaccttagccttttgcagaatcatagggtgttcttgcatcaaaatggtagcccacatagtgaggtgtccagaagattcatgacccgcattaagatacatcaacaaaaggtcaataatttcctcatcatctaagactcttccgttttcatctttaacatctattagattatccagcatatcttttctattggatgaaatattctgcttcctttgatttcttcggttagtcactatggactgaaaggcagctacaagttttttccttgcctgtataagtggaaaatactactcttcaaatcccaagagatatgcacaagtggaaacaagaggttgttgaatgttttaccttcaaagctctatgataagcaaacccaggaagattaatacccattgctcgaactccatagttaaggttggtatactcccgttccaatgaatccatgacatgctcactctcactgctgagaaatatgtacataatgaccttaaacgtaagcttacgcaaatgagataagaactcgatttctcccattttggaccatttttctagatcagtattaacagtttcttcaatgaactgtatgtatacagagagagcttcagggccattgacaggagcagaagtcaaacgcctgagcctcttgtgttcttcaaaggagataccaacaaaggacttcctgccaatgagtttcatggtagattttggccaacctatgtggaaggcatcatcatctgttagaactcgcctacaagtctctggtgttgttactagtacacatgggtacccaaacatgtgtgctttataaatcccggtacgcccatacctgcatcattgaggaaacggagagtatgtctaagttttcaattcatgatatggagaagcaagagagcaaaaacaaaatctcaactaaagcaaaaagtttgagaagagagagcacctggtgatgtaggattggatgaaggattcaggatcagatgttttgaaagctctaagaaaggaccacatgttgcctatgactggccatcccaaatcacctggtggcagatagtgttttttctcaccaagtttggacacataaatccaaacattcactctcttcagcacccatttcaaaacaaacaatcccaatattatcaaagggaaccacatgagaatcaaacccgtttccgtcatagcttcagtcgtaaacactctcctataaaaaaaactcaatcttttgcacctgaccacctcttgtatcctctagatgttatatcataccctgcatatagataaaaaatggtgagaaatatctctataaaaggaggtttcttaaacacaaaggagagtaaacggacaaagacttaaaattagaatagtggaacagtgttgttgagtctatcaagggaatgatacttatctaaactttaaactaaagaacccgaccgcttgttttctatctatttgttggatagatgttcacatgtagtgctcagtgaccatactttcttttccattttagctcactatagctcttccctaagcctttacttctttgagaaaaatatgttctttaccaaaaccatactctttataacattcattgatgacaacaatcacataagaaactccaaaattgaacaacacaccacgcaaattgatcacaacaatcacataaaaaacttctaaactgaaaaacataccacgcaaattgcagtaccgttggatccaaactaaaaccaaactttgcaaagaacttatgtaaaaagaggagacagaaaggtgataaagagcaaaactcaaagtaggagtctaggagaagtgagactctaaataataaacgttgcagaagaatacaaagaccgtaaatggtggtgaagagcacacattcccaaaacagaatcaaaaggaaacaatttaacagaagaatccaaaattggaacaaagaaacaggaactcctatcaaatttctcgtgaatcattgaaagacacaaagactttattcctgtttggttcaattttagctcttcaagcgttacttttcttttgtcaccaaatcaaatccgtcaattttgtcttcctctgaacacaacccacaacacatttgagagaaagcccgaacctttttgagccaccctgcttcgtctcccccattggcgagagctacgtgagcagaaaaagatgcaaaatttcagtccctccggttaaataggtgtcagaacttgccggatttgccttctccgccatctccgtaccaccattgaaccagagattgtgtggcacagagtaaactaaaaagagcacaactttgataaaacactgttctatttttacctcataacatacttatttctttgtaacaagatattaaaaacattcgttactttgcattgatctaaataaaacccacaagctacttcactcccacaaaaaacaaaaacagccaaaatcagaaagaagcaatcgcgtttgctgcagcatttggtttgtaatttccttctactaatcggaaacgcttctcaaacgcaaacgctatctatctctgctagagtttcatttcgtacttatctctctatagtcctctctactatgcaagttactatgatatacaacaaatgtagctatcttcttggttcataaagaatatgaagaagaaggagaagagttgttttccgggtgatcattcatttgatgaccgatcgtttggtttgaaaacaactacttctttatatgatctatgtatatgtagtggaagggcctcaaaatctggctttccaaatagcgttttccggttcaccacatcgcttgtgaacctcttttatccgatcagctgatctgcagataccgctacacgtccagtcgaatgaagctacacatatgttgcctgcttgtgccttccattcacaatctgcaattcaccaagaatcatatttagtgtatatcatatgattaccatttacatccagattctggttaaggtttgttttaaaaaaaaacattctagttaggtgcatagaactaactaagtttaaccttttaccacttcacaatcatctaagatgtattgaactgagtctatagatatttgaaggaaggtaccaggaggagtgccacaacatagtcttctatcatcgatatgtgtcacatcaagcccgataaaccaagcacctaatgtaacatcctcatttgcatatttgtgcagaacatgcctggaacattttgtaagagaagttagatggagaatgaggcataaatgatgcggtacaaaggagttcaaatcttactgattaagggaaatgtaagaagccaagtctctagaaatggcgtataactgtccagtagcgtgacggaagtacttgtttccattctcaccaaatttccaatactcaggctcatggtatctaactcctctgctccatagacaaaatgtgagttaaaacaaaactgagaaagagattcaaaaagaaggtaagtgagagaaatgggattatacttttgagatagtactggaccagatttcatgcagccgagatagactcgatgtttcttcctgtgtctaacaagagtttccccaagagttgctgcagatattttcaacaaaacaattgaccacgttattgatgtgagcaacatacaaactgggaaatagaaattgaatgtaggaagattgttcagcttaccgatatttacatgaacatcatcatctactttgacatagaactctgcatcccacttcgaaacagctgtagaaaaatatgttttcgttttgcctgataactcaaggtatccttcaacatggtcctggtgaaagtagcagagaatgagaaaccaatattcaaggatttggacaccaaaagcgcgagagttaaacttgagaaaaaaaaataccaatctcaagaaatctccatgcttcttgtcctctgcttcaatggatcggtctagaattccgccagccgtggcactaaagaaccaatgccaaataaaattaacactgagtatgaatcatctcagaaactatgtaagaacattgtggttgattcgatatctgacattatactaaaagattcaaactctcacctatgaccaatcacaaaccgtataataattcccttctcttcttccaacttctttcttttctcacctacaagcaatattttcattagaaacatccatcaagtaacatatcgatatcagcaatcttgaagataaagaacctagaaggtgatattagaacctgaaggcatccaagttgttcgaacagaatctcttctctttcggctactaaaagcagtattaatccctacaaccatcaaataccgtcttttccccggtaattgcttcttctccatatcattagatataggagcaccgtttactaaagactcctgagccgatcttgctgcagctaactccatctctaagcttgaaatagtcttatccaatgtcctgaagttaaacaagaacgttttcaaacccgagaagttttaaaatagttcattacagcttaagagatatctcactgtatagcgttatgagtcttggaaacttctccaaacaatgcctgaggatcacgatttacttctttctggtagagctaaaacagaaaaacaccaatcaaaacttgtacatactcaaaccaaaattgactaaaatgaatcaaacagaaacacataacactcacggttttcggatcacagccctcagagatcagcttcaatctttcagcttctgtacttacagatggtcgaggcatgtctttagactccggaataatccacatcctgtaacagagagtttcataagttttgagaaaaagtctcatcgcataaccaagaaacagactagaactagctttaatcagatctcatggattgaactacaaatttggaatccaaaatagaaacagtgagcatcaaacaatggtgatgcaagagaagaatcccagaaaggaaattgttaaataaaataaaataaaaataggaaacttttactataacgactcgatgaatctctgaagaaacaaaccataagaacatcatgtaaaactaaagagaacaaaaatcaaaactttccagaaataatagctgaggaaattcaaaagtcaagatttttaacaatcatacctatcggtgaataatattccgaagcagaagctcccaaagcagagtaaaaatgtccattttttagatactaaacttctggagggaaaaagctctcctttgatcttcgtcgacattatttattctcttcagctaccagaggaagaatagagattcctcaggagtaaaagtagctaatttaatccaatcaactccataagattaatcataaccaaaaatcaggttaaattcagatacatcaaaaagaagtagctcatcaatcttcagagcctcctaataacaataaagttgagatttttcaattagtccgagagaaattgaaagagaagtggtgctctgtagtttcgtattgtataataagagatggaattaaatagattcttggtctctttctttctctttctctggctctgtatttttgacgtaagagtggaagaggaggggtcgttgaagaagaagaaataagaacgaactcttaaccgttccggtttatacttataccaactctgggctgacatttcttggattttacccaactatccctatcaataccgttttttattaaaacctaactaatttattatgatgtgtaattttgataacaatcgtatgccttttttttttttttttcatttaatcaaatctcatgtctttcttatttcttgtctttatgactcatattttcacagacacccacctaatttttcaaatttttctagtaaagatatatatttctttctgcggaaaaaactaaaaattcatttataattggtgctttgttagtttttaaaggtgcataatgagacacatttatatttatcttttcaaaaattatattatatatacatgtgtttactaaattcaagataatttaaaagtatattgtaacaatatgcaaatgagattgatatagttgccaattaattagttattgtatattaaaaaatctcttgatttttcttggagtaaaaattaatattcatagtgttaaaaaaagaaaattaatattcatttgattgaaaatatttcataataattgatagaagtaacaaatgcgatgttaggacaccaaatctgacaccactaaagaaaatgatgtgtactaaactactaattcgtgctagaaatctataatattccaaaattttgccttttgcctttctggtgatttttacactgttgtgaatattatatatataccaataagattatcatcccattatcatacgtctcaaagggagaattaaatatacatatatgtttgtggcatgaaaaaatctatatttcgagaattttccttttggtgtgggtgtagcgtagaggttgaaagaataaggcggttgatgaaaaagggcatggtggtcctgagcttttctcagcagataacacatgatcttgataggattcgttattcaactaaactttttattcacaaacaaaaaaaaagaattatttacaccatgaatatcattttcatcatagctagcctgaagtctctgggttcgggggttaattagggcgatacacataattccaatattaaagaaaaagtatgggataggaccatatattccatccaaatctgttctcctaaagagtgattgttatttgactcttgcaagtttatacgtgactaactataacaatattggttaacagtattattgatttattgttgacaaaataagtgacgtgaaacgactgactttgtctttttcttgggacaaacacgtcggcagcataagctaattagattgcttgcgtttttatattcgttccaactacaaaactttttgtaactatcaagaaaagtatttgaaatttacatgagcaaataaagagaagatgaaaatgaatgaatataagaaaatgaaaacttttctgatatcttcctttgttatgctgaatggatcaaaaatttatgaattgttttctaacaacttctgtttttaaactatataattgataacggaatttaagatcaatacaacttcatatcatatttgacgaaattgggagactgtgattgctaataaactcaaaataaatttgacttgggaaagaaagtttaaagtggtctatgtatcagttcaaacttcaaacacatgcatatatgatatatacagtgcaattgattgcatttagccgtacgtagaaacaatcattgaggtggcattaaaatgattgttgccatctatttgacgaaaacaaatagtaatttcttagtggagaaataatagtataaacatgtgacacatgacataaagcgtctaagccaatgaaatttagttattatcaaacaactcccacatgcattcccaagtcgttcactcgtttgcatagctttttgttgggtagttaaagacagttttcatttataatatcaccaaaaatcatcaacacgatgatagatcatatacttaaattataaattgatctaattctcacgctgtttagcgatttatgaacaatacgctcgatcaaaaaccaaaacaagaagaagcatgtagtaatctctaggaatcaaaacattaaacaaacaaaagttagagaagagaaaagcggttctgacggagtgacgggaggggcacttgcaaaaggggacggtcggaataaagtacacgtgacaaggttctgccattggacatgtgtcgttatctggttggctgttcagttcattagatccgctcaatcatgtgacgtttttccgttttccgtcacgtggtactgcgttaaagtaatgatcattggatccaacggcacgagtttcatccacggaactatgatttttcctcactttgtgtaaattactaaattgtgtccaaaaacaataccacatgacttcacctcattagcaaatatttcggtctgtttttgtaagtcgatcgttatatacatccatcatcgaacattattctgaggttgtttaagttttacatcttatactggatacaacatttgctatcattttacaattctagcaagttttatggtcatttatttgatttcacatgtttactatacatgtattataccattaccaatggtggtaaatggtggaataattcaaaacggtgaatcaaccggtacttttattcatcgcggtaaaacgtagaatagataaactttaatcactacataaatctgagattcgttttcgacattagcaaataaattgatggaacctatgaaattataacatagacaataaattaacaatgaggtgacatctccaaaattgatggcactttaattttgtaatcttttggatcatttatattttatgggatatatgtcctatccagggaacacacatacgttgtacaacgagaggatatgacatgacagtcgtcgttacatgccacattcattattttttgaaacttttatcaaaaagtaattcttttaggccggtttttaaagaaatgtagttgaaattgtttataagaaaaaaatcatagaataacagtccattgatgcttgtgctcatgtgtcatgacatctgtttgaaggagttagttcgaatgtacttatattagttaacaagctgatcgaaaaatgaatttgatattggatcaatgctatccaaatttatttaataacaaaaaggcttcagatctctccttgataagtgttctccggagcctatggaatccccaaatggccaaatatctttctgtcttcttttttttctcatgcactttttttgttcttatgcacttattatgtttatctgtatataatgtattgcatgaaattttacattatatttcaatactacaaaacaaatttgagtcaccaccacccaatactggtagtgtatatctatatatatattatattatttacgaattaataaattatattaatcaaatctagaatggcataccaaaaagtgatatagtgactagcgagttacgttacatatggattaacatgtgcatgaaaattatacatgtatttatatacaaatacacatgcaccaataacttaggaaaaatagtgtcattaaagtatatacaacgtacatacgcaccaactgcacaggctgtcaatttgataaatcataatgcattgtacgttttttctttttttgcaatgatatatgtaacccggtttcgaccacgcgagtgaacaactaaacaaaacccaactaggtcaaaatacattcgtttccccttacaaattatacaatataatggcagaaaatttaaaccgtttctgaatctcaaatttacaagaaccaaatattagcttgatttggatgaagccggtcaatttatataggtttacttcagtaagtaagagcctaaaatggttaggcttaggtgctttgcttgtaagaaaggagaatttgtactttaaatgaaaaatataggaacaacctaatttatatgtttggtttggtctctctggtcttctaacgaactctagttaaagctgccatctccatatgtatatatgccgggttcttgttaatacgcctttgtcaaaaggtatttttgtgtgtgttacgataactagcatagttcgacatttgaggctgagtttatattttgaatccaggcacagccgcacattcaaacttgataattctttacttaggcaatgcatatgtgatctcattcattatgcattcatttatttaccgataattctttacttaggtatgaatcttccaagaaagtcttagtcaaacttgaatcccgctggtgagatcgatgtggcaaataataaagaatctgcatggtggaaatatatttaacggtatacagtctaatagtcttttaccatttcactaatttttattaaagttgtacgtacgagaataatcatagtcataaatattatgaaatagaaaatcagatcaatgttgtccgtagtttgctttataagtgagataaagttacgaaagtgtggtaaaatttgtctcggagagtaacttgaaacgtaaagatgaaacaaagttgttaaagatttgattcttattagatgtgccacgcttttagagaaccaaaaacgatcatgaaataaattcgctgtttctatcgagctctttttgttatacattactataatactatgcggtatagaattacgtaccatattgtttttatcaaatagttaataactgtattaaattgctgataaccaaaacaaatttggtatggcttggttcttcggttaacgttttcagtttttgttgttgttgttgtaatttcataaattattaagagaccactacattattaagaggccattttacatattctattaatatatctgtaaaaatctactcgttcgacaaatttataaacttttatttctttttgaaattaccgttttgccaaggttttttgtcgacaattatgtgcatatgacttaaacgttgatcttacttgttttaaaactcttaccgagagaatttactctttattagaaaatttacttcctctatatcttaacgttgaccacatagttttggagtccaaaaatactgaactttcttagtcacgatagtgggcattgataaatgcagcatgagactatatatcactattgattatctgctacaacgatttaatgctcttattgataaataattcacaacttcaatatttttgtctcagttaaaattaccaccggtatggagtcaatagtaagtgatgcccaaaacttgccataaactttcacactagctctcactctcaatggccccaaatcccttaattttatgcattctttgtcaattacaatatttttttttgtcgtatatacatctttccatatctgagtccacatgttgatatattatatcaaatatttcttagtggaaaactcttttaggatttggatatttagcatagttttaaatttgaattgcccttttttaattacgtttatggttgaaactataggtggacttcttggaatatacgtcatgtaaacattaggtcaatcaatcatatcacacaccatacaaaatattcaattctctgctataaaataagacaacaagtgaaaaatactacaacaactaacacaagacacaagacacaagtggtgtcgttgaaattttaatatgcttcaaagacttttgaggtttttgggccaaggaatccaagtttatgtctacacttacaaatgggcctgtttgagtccatagccacaacacgtgtcaggatcttgacgggattctaaataagacacgtgttaagatcttcatggccctttgccgccgtcgtcaccgagaaatgccgcagacagatttgctccgggaacactaacgaacagtttttcgaggttagaagaaaaaaaacatggagctcaaagaaaaggctaaagtcgtaattaccgtagcttctctggtggcggtgacaattctgttcgtgacggagtatcgccggcgccgccagaggaggaagcagacatcttctttaagctcgtgttatctgcattctgagctgaagcctcagtttggttttaaacgtgttcttgcggataactcttattctgaattcaaacacttgaagctcgttgatgcttcttcttcttccttaggtgggattcaatatctcaagttttgaatgctttttaatgtttatgaatttgcattttgatttttggtgttttatatttgaaactaatgcagagaaaccttcgaatggtcatccatatgaaactgagatcactgttttgttagagaatcctcagattgagtttggatttttgagaggagagtgttcattggaaatgagtgattcatatgtgtgggttgagacagagtcgcagttaaaggaacttgcagaaatattagcaaaagaacaagtttttgcggttgacactgagcagcatagtttgcggtcgtttcttggtttcactgctctaattcaggtaaccaacttgtaagaatcgttgtagttttttttaaccgctgaagttgtgattttaattcttctctgaaacttgcagatttctacacatgaggaagactttttggtggacacaattgcgttacatgatgtaatgagtattcttcgtcctgttttctctgatcctaatatttgtaaggtatattgttcagtgttagaatcttgtaacttaatttgtttcaaatttttggaagaagtcttatgtagcacttgtatgtttctgacaagatgatttagtcccccaaatttctatgtgcattttggaacattaatatgtgattggtgcatctaggtgtttcacggggctgacaacgatgttatctggcttcaaagagacttccatatatatgttgttaatatgtttgatactgccaaggtatacatttctctatcctgctctaaatatttaagcttttggaatgagtcagcatagaagaatttgtgtgttctgctaactctgccgtttttagaaaatgttgttatttgttattctgttatatgcatatacccatgtttttttatagtaaggtgtgaataaagttggtgttgcagtattctaaaagggttccactaaattgcgataaatcaggcatgtgaagtgttgtcaaagcctcaacgatcactggcatacttacttgagacagtatgtggagtggctactaacaaattgctgcaggtcagtgctttaacattacactagtcttttagccatgtcttactcttttctatcgaagcttaagttggtgactttaactcttttgctttgatattttcaatgaagcgtgaagattggagacagcgtcctctgtccgaagagatggtgcgatatgctagaacagatgcacactatctgctttatattgcagatagtttgacaactgaactcaaacaattagccactggtaggcatctttgctatggagaaacattttagtatatgatggaaaagtagagctaacccggcaacaatgttagcgatattgttttattcttgcaacaaagttctaaaatgtgaaatgtatcagaagattcatctagccccgatgacagattccattttcttctcgaggctagtaggcggtcaaacatgacctgtttgcaattgtacacgaaagaaactgaagattttcctggtagtgctgcgtcttcctcaataatttatcggcatttaaacggacacggagataagtctaacatctccttgaacgcagaagtatgcatacccctcacctcattatgtgtactcaattatatatcgaaactttttgttgatgttcgtattttcgcaacaggagcttgttaggaagctttgtgcatggagagatttaatggtgagttgattcccctgttttttttttttttaattagtttcaagttcaaaatgttgtagctgcaagacattttccttgtcgttatttcattcagacatgattttttgcagggacggattcatgatgaaagcacgcgatatgtgttatctgaccaagctatagttggtctttcttgtaagcagccaactacaaccgaagagatatatgatacaatagctcatattgatttggctacagagtcttccccgagcttgagttcctctgttcagtctccatatcctgttatttgtagtcatttggatgacatatataaaatgattctggacaagttggctaagctggatgatctcttaccggtggttcttaagaaatgcttgggcacaaatggaacatgtccaatctctgtgttcaactattcccttttggtgaacttcaagacaaagctaagtagccactctgctcccaagcaaaatgggcataagaacttcaagcagcaattcactcggaaggcctcgcgagagctttttgttaagaagttttcctgcaaggctcccgtttatcataactgtagaatatacgctaatgatggacggttgctatgttattgcgataaaagaaaacttgaatggtagatgatgatctactgttgtattgtatctgtacttcctcagttactttgattcaagagcctactctctaagttatatatctttgtaatatcttacaggtatctaaaccgtggccttgcgaagctagttgaagaaaatccacctgcgataatgcttttgtttgagcccaaagggcgtccagaagatgaggggaacgatttttatatccagaccaagaggaatatatgtgttgggtgtggggaagggaaacattatctccgttaccgaataataccgtcgtgctatagagttcattttcctgagcacctaaaaagtcatagatctcatgacattgttcttctttgtgtggattgtcatgaagttgcacatgctgctgcagagaggtacaagaaacaaatcgctacggaatttggaattcctctttttgttcgtagagtactcgattcaaaagaagcacaagggacgtcttctttagtggaggatgaatcaactggtgactctgaggatgcaggtgtctccccattacatcttagatcagctgcaatggcgctcttgcgacatgggaacagaatgccatcaagtcgccgtgaggaattgttgcaggtgatgtgatcatctaactatttcaactttcaagaaattgatttgaaccaagtattctgttattgatactttcttttggattctgaatatagactgtgaagatgtattacggtggacgggacctatctgaagaagatttagagaaagctttactcatcggattgagccctcacgaaagaagaaaactcgaaaggaaaaaaggggtctccttcaaacattctgcagaggttgctggtatggacaaacaagaaggtaaccatataataagcattgaaaattgtgttggttgataaagtgtaagatatgatgatcctttgatatccagaaatactgatgcaaacaacttcgtatctttagatgaaaacaatgatggggaggctcttgcagattttgagaaaattatgactgtagaaaggagcacagttgttgatgatagtggtgatggtacaagtgaaggagatggagctaaagagctaaatgatactcagtgtaatgggaatacgttgcaccaacaaaactccaaactctctttgttaggacatggaccgcacgggaaacagatcgtagaatatcttttaagggaacatggagaagatggtgtacgtgatttctgtcaaaggtggagaaaagtgtttgttgatgctgttcatcctcgccatttacctggtggttggaatgttagtcacaggtaaaccttagatttacgtcttctttttaattataaacttgaggttctacttggatgtttatcatatcttgttgtgacatgagacaagtaacaacttttgtgttagagaaccaaaagtctttgaatttactaaaagtgaatttatgtggaccttgttctttacaagggtttgattgttttgttgctagtggccgaagagactttggagaattcagcgtttacaatcccacaaagagactctccaccgagtagatttgtctgtttctgtaccatctctaccgtttcgtcaattttggattgtcataatctaggattattttgtaatcccccgaccgcatcagtggtttgttgttgtattcttctgtagacctctgtactttgttttagccaaaagtctgatccttttaaaattgcagtatatgactattttgaaacgataccagaattttgctttaggaaagtcatacaaaaatggctctatgcccatcacttaacgcgagctcttcggttttgaaccgcggctcaaaatcaatcaatatacatgaggaattcgaaactgtttctacaaagaaatgatatctagttagtctggtgtatagcagaataaaaactccaagaaaaggttaagtttcaacttgaagtgagggtaaaagatatgttggagttcttctgcagccaccagtgtctaagaatcttctataatgtcaaagactgagacttgtgatcaatgccgttgaagatgaaagttcctcgcttgggaacaaactgctttgtgatgagctgcaaacattgccaaaccataaaagaggttaatgtttgtttcacactcctatttgatactgcggggtaaccattttgagcaacatggatatgaaacgaaccttgatcacttcttgagatgtgattcctcctattaaagcagcaaccacgtgaatctctgcagcaccaaatctacacatctcattgtacagttcttcctgaagttcatagccgtcacaacccatttcactaagaagactcagggcaatagtctttaactgggatgcgtcctcatcagttgatctatgagaaaagagacatgttaatggcctaacaatgccaaaattattcaagatacaatcaaattttgccagaatgtgttctcttacccatcaaactgtccaggaaacttcttataggtaccagcaaatctatcaacagctctaagaagaatataaaatccaattgcgccactgcaagaggaataaacagaaaagtggtaagacccttaagagctaacagcaacatgcctccaaaatgctgcaactgtaaatattatttttcagttctacaaatatactccagtaatatttttgttatcacagtctctatggtcgtataaaagaatcaattttgacgaagtcattcttacctgtaattctcatcagccaagtacttatgtagttctgttgtagaaggacttttgaactcgtcttctatcgttctatatctgcagacctacaaggcgcaattcccggttttaatgatacagtacacatcaaattgtaagaaatttcagcattctcactttaagttttcgtgcattcttgcagaagctcttgatagttggctttgagatgctacttggatcctgaccaactttaactagaatactttttactctctgttccatggaaagaaaatcagcttccgctttggaatggtagattttctgcaaattgatgtagtgcctgcaaaagatacaatacagctatatagtaatctgataaaggtgatggacgaattttatccctcccatgaaacaaaagcaagaacaggagaacttactctgtggaagatatcatatcaggcatggaaccttcaagtggtacctccccaccaccttcatttgaaataaactcctgcagatgatgcatataataagtagggttaacttggatcagaaaaatctgaggaatttgagccatgttgatgggaatcagaaaaaaaagctaacttggatcaaaaaaatactaaaaccccaacaaacgttctcaaccccttccatgtttgaaatatcaatatgaagtatgtgctttgaagtgaggtctttcaagttacaaaccttgagtgctgctaccattacccaaaaatctgaggaatttgagccaacttcagcacaactatcatgattaatgtcttgaatctcttggcctggagaaaaagaaaacatgtttagttcaatgtgaaaactgacttcatattttgaactccaatgttaactgatctgttatgaatgagcagcaatgaatcatgcttcatgaaaatagtagatagttgtccatttggttctcgttgcagtttttcccattctccaaccaatttctttatttccagcatctatagtatatatttaaaagtccagtttccaccgatgtcaagacgaggtgtatgtatacttactgattcctgtaggagcaaagactttgaaagctgcaagaagggcttctttgtaattttcttcatccgctgataccatcttggacttaactaagtcctaaaatttcaaggagtaagagagataaagacaaggaatcacaagaaaaacaaagattaataactgtttgctgattaacaaaaagtaaggataccttaaactcgtttttctcttccctggttgatggaaggttgccgctatggtgttgagcccattcttcagccaccttgactagaatgacgacgtaaggaatgtgcttatgggcagcgggttcttctacatttagatcaatggactccacatagctgcagatcattgaataaataagattttctttcaactggttgcaagtttgtggagattaaaagtaatttgaaacacaagtttaaagaatggcaagaacacataacgagtgagaagattgaagcagagtacctcttcagctcaggccatggactattcaagcggagatcatcaagagaatgatcaggctttgtctcaatagcggtgtgttcctgacaggaaagagcgaacatgacatagcagttagcagacagaccatatgacaagtgacaaagcactctatccacaaaaatcttacctttacactgatacgaacaaacccagtaagtccataggagcgagccaaaaccaacatgacgtttgcttcccggcagattctatctaatttcaccattgaatcttctactagctacaatcaacacatgacaaactaataaggcaaacgctctgtgaaaatctgaaaacaaagactagaaactatctaatcctcaacataatgtacctgagtggcgataactagagtgaactgagagaagaaagatgggtctgtcgatatcaaagtgtctggattctcctcaacaaaatttgctttaacagaatcgttaagctcctgaagaaagccacagaccgttttggctcttgactgaccaacgctcttcgcatccactgaaacatcaacaacaatcatcaataaatgtcaataaacagcaaatagaagaaacgcattgcttaagaaagatgaaaaagagagaattatacccatgaaattgtttccaaggtcgccaatttctactttagatccgtcgacaatggtgatacttccgattccaccaataacaagattctttagagcctcagagccagttggaccacaattgagcaaacatatgctcgcggtttcaagagctgattgacctaattctccccaaatcctatgaatttatccccaatcatcacaatttgagcgaaattaagaagaatgatgaaagagacagagaagttgaagaagagaaagagagttgggaggagaaagagtgcaccttagctgacgatcatacttggttttgggttccgccattgttggttcgtgctcgagtctttcgcgggtttttcagtggttcgtgttctcaacttcagacagagagaaagagaaagacgcagagagagagagagagagagagagagagagagagaggttgtgacttgtaagaaagaaagggaatggcatttaataagagaaccttaagttgtctcctttctttatttccttcctaatttggaacatttacaaagtttagggcttaattgtaatttttaaaaattaagactgtattattgcaaaaacaccttaatgtataaaagagataacaaattataaataaaaacatataatttaaaataaaatcaaaatttatgttttctggattgagttttcatttattaaaatatatatatacatggaaacatatcaaaattttatataaattgtaaaaataaatgacatagctagaaaaaaacacatatgtaatttaattaaatattattagatgaataagtgataaaatctcattatgtaatagttttttgccgcctaaaaatctttattatgaataaaaaacgccaactcaaattttgccttgctacgggtctctctttatgcaaaaataaaatgaaatactattaacatttcattgacaaattaacttaagagaataaacttttgagaagaaataaaatgattaacacatggcaattaaaatatttatattgtaatctaatcttaaataaacttaacaaaatgggccgttacatgtagggcccaataatgatgggccccactgaaaacaaaaatacaaacaaacggctgctgtgactatagagtatatagactagataggactttgtgagctcgaatcaaaaaagcacttcagtcacacgtttttcaatttctctcttctattttgttctcagaagaagaagaatgatggatgaatttctgggcatgatttgatctctctagttttgtttctcttcctttagtaatctcctgtcaaatcatggttttttaaaaaagatagttcttgacttctcttgttaaaaattcgttgcgttgtcgtaaaatttcccttttttaacttatgcctacaaagtgtttgcgtatattccgcagagagaaccagaaggtagctcaaagaggtaaagagaatgtctcactgttgttaatttcaatgaatttgtaaaaactctttttcagatttttcttctgtccggatgagtttgtgtatataagtcttcatatccacattgttgctagttttcagctaaaataatcaatttggtttgacttgtgattgctcttcgcttagatcttgattcgtcttctaatcgcattgactctacaggtcaaagttggaaactttaccttgcttagttctctaatcttctcatcctcaatgctgaatgaagagttgctagatttaaatgagatggttctagttccaacacaaactatctgaagtggtccttactttgattgcattatctccatgggactgggcattgacccatctgtcgctattacggcactgattgtggtcattctggtggttccaatggattgccaaagacctcaactggtgaacatcggtgctgtttttgcttttgattcggttatcggaagagctgcaaaagtagctctagaggcagctgtttccgatgtgaacaatgataaaagctttctcaaagaaacggagctacggctattaatggaggattctgcctgcaatgtctttcgtgggtcctttggaggtaccgtgactgttcttctagttcttttgtgtttcaaacacttgtgacactcatccatggctgatacagtatatcaaacatattatagaaagcggtcaatgcacatcagtagcaacaatatttcattttgtgatagttggaaatgattggcacatcgatttacgttttaatccgttttttattggtacatattttgggttccgaatgctaataatgcatagaacaatatagaccgcataccctaaacaggctgttactaggacctgtgtttcctgtacataagtggaaacaaaactttggttttaccactaagggcctggtttaagcttcagtggtttttgttttgcagcttttgaattgcttgagaaagaagtggtggctatgatcggtccaatttcatcctctgttgctcatacaatttccgatattgcaaaagggctccactttcctcttgtctcatttgcagcaactgatccaactctctctgccctccaatttcccttctttcttcggactacacctaatgatgcccaccaaatgtctgcccttgtggatcttatcaatttttatggatggaaagaagtgatctcagtttactcggatgatgagctcggaagaaatggagtttctgctctagatgatgaactgtacaagaaaagatccagaatttcctataaagtgccgctctcagttcattctgatgaaaaattccttactaatgctttgaacaaatccaagtccatcggtcctcgagtttatattcttcattttggtccggacccattgctcagaatttttgatatagcgcaaaagctgcagatgatgacccatgaatacgtatggctcgccacagactggctctctgttaccttagattctttgagtgacaaaggtactctaaaacgccttgaaggagtagtggggcttcgtcaacatatcccagaatccgtaaagatggaacatttcacgcataaactgcagagcaacagatcaatgaatgcctacgcattacatgcctatgatacagtgtggatgattgcgcatggcatcgaggaattgctgaatgaaggaatcaacataacgttttcttactccgaaaagttacttcatgcacggggaaccaaactgcacttggagaaaatcaaatttttcaacagtggggagttactacttgagaaacttctgaaagtaaactttactggtatagccggtcaagttcagtttggttctggccgaaacgttatcggctgtgactacgaaattatcaatgtaaacaaaaccgatgttcatactgtcggtttctggtcgaaaaatggaggcttttcggttgtagccccaaaaacccgtcattcacagaagaagactagctttgtttctgatgaaaaacttggagatataacctggcctggtggtggccgtgaaaagccacgtggttgggtcattgcagattctgcagatccattgaagattgttgtcccgagaagagtgagttttgtcgagtttgtgactgaagaaaagaacagtagccatcggatccaaggattttgcatcgatgtcttcattgaagcattaaagttcgtcccttacagtgttccttacatatttgagcctttcgggaatggtcattcaagtcctaattacaaccaccttattcaaatggtcacggatggtgtaagtatccactccaaaacgttcaaaactgattcggaaagcctctgaagtcatgaacattcccagactaactttcactgtgataatgggtggcttttccttgtttttcccctttatttcaggtatatgatgctgctgttggggatattgcaatagtcccaagccggtccaagttagtggatttctcgcagccatatgcttccacaggccttgtagtggtgattcctgctaatgatgacaatgcgacttggatctttctgagacccttcaccagccggttatggtgtgttgttctagtttcattcctggttattgccgtagtcatctggatcctcgaacatcgcatcaatgaagatttcagagggccaccccgaagacaactcagcacaatgctcttgtaagttcagctcgtaatattcactgcacttgatagttcattcttggtgattttctgatacatctactttgatttgttcctgcaggttcagcttctcaactcttttcaagagaaaccgtgagtagccttaatttcatccatccatctttctttaaaaaccatcaagcaagagaaaaaaacaagtttagagttacatttaagaatctgtccgatacatattcaactctgtattgattttttgccaactcagatcagtgatatttctgttttatcctgttatgtcaacagaggaagatacaataagtaatctagcaagactagtgatgattgtatggctcttcctattgatggttctaaccgcgagctacacagcgaacctcacctcaatcctcacagttcaacagcttccctctgctattaccggtattgatagcttgcgggcaagtgaggtacctatcgggtaccaggctgggacgttcactttagagtatttaacctacagtcttggcatggctcggtctagactggtcccacttgactcgaccgaggagtatgaaaaggctctaaagctggggccaaccaattggggaggtgttgctgccattgtcgacgaactcccttacatcgaactgtttctagcagaacgaacaggcttcaagattgttggagaaccctttatgcaccgtggttggggatttgtaagtacaattttcatgtttctcttaatcagaaattatttacaaaaagatttgaacttaattttttatataacaggcgtttaagagagattctccattggctatagacatgtcaacagctatcttgaaactctctgagacgaggaaattgcaagaaattcgaaagaaatggttatgcaagacgaattgcgcagggaaatcaaattggaacccagagccaaaccagcttcatctcaaaagcttcaaagggctgtaccttgtctgcattgcaatcacagtctctgcgtttttggtgtttgttctcaggatgatacgccagttcgtgcggtacagacggatggagagaacatcctcgatgccacgcgcttcttggtcagcttctcctacattgcggttgagagaattagtgtttgattttgtggagtttgtggatgagaaagaagaagctattaagagaatgttcagaagaagcgatgactctaataacaacccatctcatgtaggggaagtccaagctgatactgaggtaccacgaaattgatgagtagattccactctataggaagaaaattgttatgtataagaactagatatagctaacatgtaagtcaatattcgaattgtaacttagcaacataaaaagctggtaaagaaccagtgatcattagtcattaccatgcttaatttggcattgacattggggatttatgtgatagggtttggtactaatagaatatgcaacacttcaaaagccaaccaaatttggatatataaactcctcaaaaattttaaaaaggttggatctttgtatgtatatgtacgtctaattgtactcataattgtttggtaatcattattgccacgttctatgaagtatgaactcatgaacttttcttttatccaacttggtgcttttatcgtatgctaatttgttttgtctggcccacccatttgctattttattggttttttttatatagttctgttaatttattgccatcatctctgagatagtttcagttctgtttcttgatcggtacagaatccaagataaattatatacaaacacatacatatatgtaaaaaatctaagtctttgattttaggttcgatacaatgtcaataaagttttgtcttttttgtctgacccatctttttctagttgatgttgatgttaaaatcaatggtcgttaatgcctgttcgatcagatttttttctaactccgaatcatcaagtgggtatataatgagcccgtaaaaatcactccttttcgattaaaagatgggatttttcgtgatgattagagatgtttccatgggatttatgctcctatgtatttctgctttgtgggttttgccaatacaaggtgctggtagagaaagtttctcaagaaactcttcttcttcttctctgccaagctctgtaaacgttggagctctgtttacttatgattctttcattggaagagcggccaaacttgcgtttgtggcggccattgaagacattaatgctgaccagagtatcctcaggggcaccaagcttaatattgtcttccaggacactaattgcagtggatttgttggcaccatgggaggtacttttcgtaaactgcaatttgaattatgtctgaaaagttgcttgtgaaaatgccccaacgaagctggggtttaatagtaatgaggttattcaaattgcagagcttgtcttgttcataaacctcttgttaaaatcttcgttttgcgcatggattgctttttctgaatgaggaagtagattggtgatatgttttcttatggtgtagctttgcagctaatggagaacaaggtggttgcagccattggtccacaatcttcaggaattggtcacataatctcccatgtagctaatgagcttcatgtacctttcttgtcatttgcagcaacggacccgactctttcttcgcttcaatacccttatttccttcgtaccacacagaatgattacttccagatgaatgcaatcacggattttgtatcctattttcgatggagagaagttgttgcgatctttgtggatgatgagtatggtaggaatggaatatctgtattaggtgatgctttagccaagaaacgtgccaagatctcttacaaggctgcatttccacctggtgcagataatagctcaatcagtgatttattggcttctgttaatctgatggaatctcgcatctttgttgttcatgtgaatcctgattcgggtttaaacatattctctgtcgccaaatctcttggaatgatgggaagtggctatgtctggatcactactgattggcttcttacagctttggattccatggaaccgttggatcccagagctttggatctcttgcaaggagtggttgcatttcgtcattacacacctgagagtgacaacaagagacagtttaaaggaagatggaaaaaccttagattcaaggagagtctaaaaagtgatgatggcttcaattcttacgcgctgtatgcttacgattctgtttggttggtagctcgcgctctcgatgttttcttcagccaaggcaatacagtgactttctctaatgatccaagtctgaggaataccaacgatagcggcattaagctatcaaaacttcacattttcaatgaaggggagaggttcttgcaggtcattcttgagatgaattatacaggtctgactggacaaatcgagtttaattcagagaaaaaccggattaatccagcctacgacattctgaacataaaaagtacaggtccactgagagttggatactggtcgaatcatacaggtttctcagtcgcgcctccagagacattatactctaagccttcaaacacatctgcaaaagaccaacgtcttaatgagatcatatggccaggggaagtaataaagccacctcggggttgggttttccctgaaaatggaaagccgctgaaaatcggggtgcctaaccgtgtaagctacaaaaactatgcttctaaggacaagaacccgcttggtgttaaaggcttttgcatcgacatctttgaagctgcgattcaattgcttccatatcccgttccacgtacttatatactatatggggacgggaagaaaaatccttcatatgacaatctcataagtgaagttgctgcaaatgtgagtcctacttcttcttctattttactcaatcaattacacgaaacagtatacttatgttttgttctatttatgtctctagattttcgatgtagctgttggggatgttaccatcattacaaacagaaccaagtttgtagatttcacgcagccatttatagaatcagggcttgtggtggtagctccagtgaagggggccaagtctagtccttggtccttcttgaagccattcactatagagatgtgggctgtgaccggtgccctttttctctttgttggagccgtcatctggattcttgaacatcgatttaacgaagaattccgcggacctcctaggcgtcaaatcattacagtcttctggttagttccatacaattattgaatcgacacaaaactcatatgtattagtttaagctcaagtgctaaagctttgctttacccccttcctttctcgtcttcaatattgcaggtttagcttctcaacaatgttcttctctcacagtatgcacacaattacatttaagatcatacgaaaacatcaaagagaagaaactctcggttcttttcttttgttaccaaggtcgcaaggtgttttattcttcttcctttgttgatcttcaggggagaatacggtgagcacgttgggaaggtttgtgctactcgtatggttatttgtggttctaatcatcaactcaagctacacagccagtctcacttcaatcctcaccgttcaacagctaacatctcggatagaaggaatggacactttaatagcaagcaacgaacccattggagtccaagatggtacctttgcgtggaaatttctggtcaatgaacttaacatagctccatcaagaatcattccgcttaaagacgaagaagaatatctctctgctcttcaacgtggtcccagaggcggtggcgtggcagccattgtcgacgagcttccttacattaaagctctcttgtcaaacagcaactgcaagtttcgaacagttggacaggaattcactcggacaggctggggatttgtatgtgaaaaccaacttcaattttttaagatcagtctctgttaaaactttgcttaatggatctcgattcttgcaggcgttccagagagactctcctctagctgtggacatgtcgacagcgatcctgcaactggctgaagaaggaaaactcgagaaaatccgcaagaaatggcttacctacgaccacgaatgtacaatgcagatttcagatacagaaaactatcaaatatcggtacagagtttctggggactcttcctaatatgtggcgtcgtttggttcattgcactcacactcttctgctggaaagttttctggcaataccaacggttaagaccagaagagagtgatgaagtacaggcgaggagcgaggaggctggttcttctagagggaaaagtttgagagcagtgagtttcaaggatttgatcaaagttgttgataagagagaagcagagattaaggagatgcttaaggagaagagcagtaagaaactcaaagatggccaaagttcagctgagaattcgcagtcgaaagatcacgaaactccacagtgagatatataataacgagttacacaatttgtttaatgactgcagatataacattacacttagaaaggtacatagatttattacatagatagagataaaaatgcaaaacaatttccctaccatcttgcaagacgaacaagtgaactgagtcatggtttcaataccaagtagtctcaacattttaaaagatctaaaacgtaacactaagaaatgtaccttgctaaagaatttgcttaaggcaatgcaaggttgtaacttgcaagtgtgtttacgaatatgattcctccaaggcgtgagagataaggaattttgaaatgatcatgtctttagactccctgaaaaataaaaaataaaacatctgcaaattcaagagtcgaaagttattagaaccgtagagttcacatttttctagactatgtagaggatgtgaaacttattcaaatgtttagaacttaagattttgtaacagatcatgggctctcttaattagtgtagtccttcgggtgactattttttctggatactatatacatcctccgaggaagattatgggcctaaggcccggtagtgttcgaatttaccactgaatcaaaccggaaaaatggtagccgtttaaaccggttcgctttaatttagatttggccaattattaagtagccggctcttcgtttccgcggtcaacgacagattaaagcagagagaaaaacaaaatccattgaagaaggagaagaagaaaaaaaatgggagcattttgcaagttgatcgatgcggttctcttcttatactttgctctcatggcggtaattgcgccgcttatcgacggtcaaacgagtcttcccggcgatatcttcccggcgtttatcgtcgatctgaatcgctggtacattgatgaatttggagattatctagtcaaagagaagccgcatttcctagtcggactcgtctggcatgagcttttgcttctttggccgctctcaatcgtcaacgtctacgcaattctcgctgggaaatcgtggtttggtaccacctcaatggtgtacggagcttccgtcgtgacttctatggtacatttagatcttaatctcgctgtttctgatcaatttggatataacgtgtttgatttagagtaagattttgttgatttatggatctgaaatctgagattaatgaagattataggagaaatgattattggtgatcaatgttaaagtctgtgaaactggaccattacaaagtatgaactaggagcagactagtgaaatttgtataatgcttgattcaagatttcatttggttccctaaaatcacaacattgtatgttgatgagggagagagattttgagtttctactatgttgaatgactagtttcatggttattagaattagtaacgttatcgaacttatacttattgttctgcaatgtgaatctttccgcattcattgctaatatgccttgtgatgaagaatctgatattgagtattcattacttattaggctgctatactgggagagatgataggatcagggaaggcatctgagaaattgttgatgatgtatgtgccattcatgggtgttggtattctagctcttcttcgtggtcttctttctcaatccaacaaaagtggtggagctgttggcaagagacctgctattttggccaggagaaagcgtgcttgaggtacacttgatgatcagcaagtgtatcttttgactctgagaatttctgctataggtggatttggcttttcaaacagaaaattttgaacctttgtgatgtattcttcctgtttttttagcaatatcatgtcatctgtgttcttgtttgaaattaaatgaagttaaactgaaaatattttacagttcacttcaccaaaaggtctacattgttgggtcttgacaaatcacacgttgtgattcccattcccaaaaggtctacatgttcagcacagatttcttagtcttgttgggtttggtcaatctaaaaccataggcaacgcgcaacagccaaaaactctttaagctctcttgcaaaacagagagtcttgggaagaaaaggtgtgaagttttgataaaccaaactacagaaatagacaacaaaaacaatacaaaagaaatatccatactctagaagaagatctaaagtcaatagaaagaaaacaaaaaacaaatttgaaactcaaatagagaaaaagagtactcaataacttcataaaggtttccaagtccaacaatgacaaggaaacaaacagactcaactgaaacaacgaaaggttccatgtccaacaatgacaaggaaacaaacagactcaactgaaataacaaaaggtttccaagtccaacaatgacaaggaaaccaaagactcgaatgaaataacaaaaggttccaagtccaacaatgacaaggaaaccaaagactcaactgaaatagcaaaaggttccaagtccaaacaatgacaaggaaacaaaagactcaaatgaaaggaaaagatagttgttttttccatcttgaatgggtttattccagggctagtcaaatcccgaacctcgtaaaaaaccaatctccttgaggttcgttcttgactcctccccttttgaagctctccaatagattaccgaaatgggggtggttcaagcagtctgacaaggaaacaaatctttgatcctccgcacggttgtacgaatcagattctcagtagttgcaacagagctaacactcagcctagcctcaggacctgactcaaccagcatttggaaggaaatggtcaaaagtgatcctccttcttttcctccaggcttacccgtaccatctggaaaaatagcaaaaccagaaggcaggatcaccacaaagtcaggatcaccacctccatggagagtaatatccattgatgtcatatcaacaggcgcataaagcacaaatgaagctgttgggtcagtagaagtctcttgaactatcatcatcttgctcttgctagtgtgtccatgctgtaaccaataataacatcagtcacagaccaaaagatataatatatatcacattttccaaaatacaagttaggtattttatacccggagtaaacttgcacagttccttttgtctatcccattcgtaatctctgctatcttgtgcatcatctctccgttgcagagaacatcccactgcagatacatatctcaaaacatgttatataaagaacataaaaaaaaaaggaagtcctgtcctaagtagtaagtaagtacgtatacattgtgtcggtgagtagcctctctgaggaagtcaaagacagtgttaggaggagcaggaagccaaaaggaagtggctgcacaaataatgacaccgggaggctttcctggatcattcacgctcttcattgtcatcactctgatatcttctccttcaacaccagaaaatattgtagaccccgtcgcattggtcattccagcaaagaaggttctcgcaatccgctcagctatcttcagcatgctcatctttccatggttagttagcgctgcaaaacatcacaaaacgtttaagaaaagaaaacagagaatacattttccatatgaagcaaaatttggtaatgagtttacttatgtgatcaccggaatcgacagattgaaaatctgtcgacaagatgctagatatccgctcacactggcgtaccaatgtaccaacccagcggttagcagcaaaagcttgaccagtacagattaatttctcaaagatgctgtaacttcctgcatcatctacttccacatgttccacccatgtaacctttttcaaaccaaaaaaacaaaaaaaaaaacatcatttaaaatataaattatatgatgatacacaaaaataaccataatgtaacaataagttacataccttggagtaaccactatgcatttcttgaatcagacatccagagggtcggcggcgacattttaggttgatgtttgggaggagatggtcgatggaaatatcgaccaccgcccacaaaccctctccttgttgcttacagtagcggacgaagtagctttcgcgggttgtgactagcggggaaagcacttggtactcagcactcatctatgaataagaacaatattaattggttaaacttttatatatcaaacaagtattgttttttttctttgtataactctatattagtgtagaagacttactatttggagatttccattgaagtttccagcagcatcagccattatctgttcatgagtcctggctctaccaacaattccggcaaacattgttgaccacagattctgcaaatacaggtcattaattacacacctgacctaatatatgttatagtatactatataaaaggattaattatgatcatataatttgattgattaatttacctcttgcatgagcatttcaacaatgccagtaggacacattgccacgagtgcagtttccctggatgcctcggttcgaaacccgccaagtctaggaccgagacccgtgcgaaacgtcttttcgtattcatccaagttcaaagctaagctagtgccattaaatcctcccatccacagtggttcagccacttgagccatcaccaagagctcctccatggctccaaatgccaactccatgatgatcggcttggtattagcatctgcaggtccagtggtttccctcgagtggtttccgacatttcccttagatcccatcccgaactcgaaatttggaggaggattaggaggagacacacggggatggctccttactggtatccccgtaagccttgatatcttttccgctgtcacggaaagttgcttgatctataacccacaaaacaagaaatacaacttgtttaatcatttttgaagtgttactttcatattcattgaaatagtcaatgtgcaattgttatgaacatttacatttacataatagaaatgctctagttcaaatctagtacctcttcagtcaaacgagcgttgaggatgcgaagatggtgctcttcgaaggtcatttcgccaattgcagtttggcctccacacttagggcataaggcttgatgaatagcttctcgtaaccgctgattttcagacctaaggtggttgttcagattccgaagttctgagttctcaaagcgttcttgttgattctgcaaaacaaaacaaaagttcttagtatatttcaacttaactgaaaaaacaactaattaagtcgttatcattggatatggaagcagcaaatttaaaatgagctttttggtttcaagtgaataaagaataaacaaatgtcgtattaattgcgttcacaaacacacacacttcgtctacagatatatacacctgtgcaaaaacgttgtgttgttccacacgtttcaaaatgttattataatattctcttacggaaaaaagacaacaaaaaaaaaacacttgatttcatttatttcacaaaaatcttactacaattcaacaaataatatatatgtggaaccatcatactctagacttatataccaagaattattcaagccaactcatgcctatatatacatacagaaaatatgtgtgagattgtgagaaatttattacatatatacgtaccttgttttgagtgcgtttgttctggaaccagaatttgatctgaacagggtccaatcccaattgagcgctaaggtcgtacctttgtttgtcatctgggtgaggacactctctgaagaaactattcaacacataaaagaaaaagaaaaaggagagatgtgaaatgattataaataacttagtactgatctagctagatagaagttgagttatttaaagaaatgaagaaaaattacgcttccatctccgaaatctgaagttgggtgtgacgattgtattttttcttcttatgacgaggagcttgattgtttcccaacccttctccatgattgccacttgaggtattcccactgtcgaaatcttgatctccagaatcatttccagcattagtgttgtcagttccaccattgttgttgttgttgttgttgttttcgttgtcgttgttgttgtctccgttgttagccactggtaccatgtttgactgagacatttttgttgttgttttcttttctttgggattctaaagatctgagagttgaaatagaaaatatcatgagttacatcaaattagagggatataaaatgataagaattcataagatctagaaattagggtttgtgaaaaaggtttctttttcttttcttttcttcttgagtacaagaatcaaaaaggatttttttccaagatttggatttttgcagtcagacaaaacagtacactctctttcactaaattcctgacaacaaaaagtttgcttttccaagtcaaccaattttttatctttattttctttttctagaagatcttatagataaaagagaaacagacaaaaaaaaaaaagacaaagtaattgaggatgatagttggaaacttggaataaaaaaaacccaccagtagagattaacaaataatcaacccaaacaaaatgaattatatatatatagactattaaattaaccccaaaaatattttgcaaagaacatgaattaagaaacaagccctaaccggagatcaactttatgaactctccgagattagtttttagaagtttgatttaattgttctttaattccaggatttcacaatttatagatctaaatatagaacaaggagggactatagaggaagagaatacaaaaagagaactgttggattcatttgcccaaaacaaataaaatcaccatatataagtagatcgaaaaaaaaaaaaaaaaaaaagagtagatcgaagatagacttattattattttattttttaatcaaacaatatttttttaaaaaaattgatagatttaaaattagttttgtaaagatctcccactcaacatttattttctcccttcagatatattatcaatttttgtatacaggaagagaccaaaaaaaaaaaaaaatggtatgagtcagagtatcatctgtatatgttccgaccaagcagcaaagaataattgtgtgtgatgtattaaaattttcccactatttgttatcatctttgtatttggtaggatataaagtatataatcgtagatgcattattaagaacataaacataaaatacaaaggataacgaagagatccaacaataccttttgaagttttggctgtgataaactcagaaaaatcaaatcttttttatgtttttcgttcctttgctagcttgatctatccctccgtatatctttggctcactcttttctacaaaaacgaaaaaaaatattaaaacaaaatttcgttcccagtagaaagatatacaagaatcagttcatcatttgatgtatatgacagatacaacaaatatgctactgataactcgatatttttatatatacagaggatatggtgcaacgaaattcaatcgaatgaaaaggttgaatccaatgatatatttgagattaatgagaaaatcaatgaatggttggtgtattacatgggcgatgaaatatgggagtaactcttagatggtatcgaggttttatgaagcagttttgagaggtaaatgaaagtgctgagagtgcgagtgaattgagtggtttacacacacatatttataggtagagagggagagacacttacttaaccctacactctggaagaagagggagagaaagctacacgttaaaaagataaataataaaaaaagtagattctatctttccatccatgtgtctcaattcaattggttttccagatacgtttatagtattattacataattctaattaaataaataaaaaactaaattaagttttctccattaaaagagaaatataataaaatttagatttaatgtcattgaaatatttttaaccatttttggtatatttaatttagtcattttaaaatttttaatttgaaacaaagatttctataaaatattatgcttatatggtatgagcctaggagaaataatgtaagattatttcaattttaagatttgaatttcatagtgaaatggaccatcaaatagtttaggaaagagtaaaataagataagagtttataacatattatcatagaaaaaaattcaagtataattagttgttttgataatgattaccatcaattgatttttgaatgttagaagatttgtaatattaatcgatctagttaataatactatttgtagatatgagatgtacggaataaaaatacagaaacgacaaatctatgcttttattaactatatagatcgttatacacatataaagtgagcaaaataaagaaaaaactagaaaataattattgactagatcgatcatttataataagaaagaaaaaagtcggcggaacaaaaaaataagaaaggtccaaaatagaattactgactcgatcgatcgttactactatttattaaacatattcaaatatcaatagataataatttggtaaaatttatttaactaactttaatagctagtcaatacattatccaaaatatccttaaacatagttagtcattagtcaattatttttctatcaatatgttcaatatacatttttaaatatggatagtgacgtaacgactgacactagatagaacataagaaccaaaagtacaaattctagtcgccggtcatataattatttttaggattttgtcatctaaaataagtttgacctaagaattaatcataatagtcaaacttgaaacaattatttaaatttatgatcaaaaataaaaatttagtttttatgtgaaatttcatatcattcaaaactatacatactttaaaaatagtctataacataattggttccattatttggtaatctaaattaacctaacatagtatcatatcactcaaaacttatagtcactatatttctcatacttcagaacacaatataagtttaatattcaagaaaatcaaaattaaatccataaaattaggagataaaaatcttatagactatagtgaaaagtgtaagcagctggttgaaaaaccaaaatctatttttttgtttaagaatttaaaatctctttgtctttatcgataagtgtcactaaacccaactcgtgaaacaaccagttctgcaaaccaagttaagaaatgaaatgggtccaatggtaacggaaagcacgttacgtatttgactgctaaacagtttatggccctaacaatatttaacctttttggttacattcaaatttagttttgttttttacactaatttccctttattacacactaaacagtctgtcgtttctggttttatcttgcaccttcacggaacaagcatgcttgcttgtacacgtgtcagatatagatttttttttggctccttttttggcgttttatgttttacggtttcatgtactcattgcaattacaaaatgtctgatttacacctttgagttgttatccttattaagatataaatccaaaagtagcttttattgataatatattttcccttatataattgttttttttaagtaaatatgacgtaggcaaaccaaaagacgttacaatttcaactgttcaagatggcaaactatgatttgtagaaattttggatatatctgcattttcaactgttcccaatgtttcagattctaacttacattacaaattatcaatcattagaccacaataaagtattcatacaaagttgcatgatacaatatagtttaaaccaattaatttttgaggattctgaggaggtctcatccaaaactcacaaccactacttttcatgttatggttttgtgcaaatcaatttcttacgggtttgaaaactgtagtttattcgagaaaaaaatatcatttacaacataaaatcatatagcttatacaactttatatatccaagctgcattagaattactgtcaaattttgattagagaatattttgaagtaatcatgcatgttttaagaccaaaccttatataaattaaatcacaatattaaaaacgaattaattcaacttcatacatattagtgatccaaccttaaacccactagataagtagtactgtatatcccatatctacatttaagtaagtacgagtgcaatagtgtaataacacaacttcctaccttaccacatatcgaatattttaatatggcttaaacaactggggtaaccaattaataacagattgaaatattaattaatggcaaaaaacgattctcttaatatcgtaagccccctgaataaaagcctttgttaaatatggagaagagcccattaattagcccaagtcataaactcatcttgactttcgtaatgtggtaggcgcaaaagtggagtcgatcctttggttgttaaacaaaattttataagtgtattttggataaattcgttatgaggattacttacaaaaaccagagtgattaagtgtattttggataaattcgttatgaggattacttacaaaaaccagagtgattaccctaattatgtttctttttcgtaaatattagagacaaattctatatagaaatgtatgaatatgatcatcatatagttccctaaatatttttgttaattagttccctaaacttgaggatagatttgttgaaggatcctacttagtcaaaatatgtaaaacaaaatcttgttgcaagatatccgcaacgaaattgaaataaaacaagataataatttccataaaatcaaacacggtatccgatatttgatacattgaattgaaaacgaaaatcgcatgcgttgtgtttggttagttcatgttttcatacatagcaagatcttaaaacaaaaaaaaaaaccattgccaaaaaaataaaataaccaaaaaacgaaaaaagtaacaatagaaaaaaagatatgaatatttgtctcaacaatcacaatcataagatttggtggagagagatattaaacaatgaaggtgagtgtggagataataacgggaacatttatagatacggacgtgagtgaagatgcgacggtcaagcaaatgaaggagaagatcgcggtggaggtgaaattgccggtgacgcgtttgatacttgtcattggagatgaagagacgagaagattggtgatggaggatgaagatgacatgatgttgagagatttaggagtgggagaagattctcatatctatttgttctttaagcatcctgatttggtttctaaggaagagagatctaaaggagaagatgatgatgatcctatggaggaggtttcttcggaagcagagagtggaagaggaaacgaagaagaagtcgaaaaggcaaaaatagacggtgaagaggaagatcaagcgatgaaagatgaagaagaagatagagatgtgaaagtagaagaagatgaagaagagaaggagaaggagaaggatggtgaagcaaagtatgttaaagaggaagcaagagaggttgaagaagcagataataaacaagaaaattagggtttcttgatttgatttgagatttgttttaacaattccaattttattgttttgcttttgtgattatctagttatactgtttcttgatatacaagtaaacaaccaaacattgattttgttctgtttagtttctttagtttatttttcgtcttctctgaaaaaaacatatcaaaagtttctctatgagacagaggttggttatcaaatgcacagagaatccagttaacctgaagagccgactggtcaaaagttgcttaagatttgtcatgggaagtaattattcttcatcccctcccactttcctcgtcaatgaagcggcacttcggctagatccggatatctggtagtaattatcttccgtcattgagaattggattaattaaatttcttgacaacaaacacattattttgttgattaattgaaaatttgtttacatacgttgataaaagaaaatacatttactagacattacattagtaaagttcttaatagagtttaaatatccggcgacttttttgtaaacctaaaacaacgatggtaacatcgtaaagttgtagaatccacctagtccgttagtcgtactatttaaactttatctatttgttaataaattgaaaatttattatctatattctttagtgaaaaactatttacattctagatatgcatcacctgacattagattagtaaagtttttaatcgagttttaaatatctgatgaccttcttggacacacaaaattttgcttttaatattttaaaagttatagagtctaatgtacttactcggtagtcgcactatttaaactcatttttgttaataaattaaaaaatattaccacctacattcgtttaagaaaatatatttactctcgcagattatacattaccagacattacattagtataaaattttaatagaatttaaaattctaacttcttgctcagaatcccaaaaaatcaactatagccagcatgttaatattgtaggatccacctactcggttgcactatcatttaattaacaacttttttttgtcaacatgcattatgtaggtttgaactcgtgatacaacacaaaaccaatatcaattggtacaatgcacattcttgttttaaccacattaaaatctatatattccatcaatgtttaagaatgtataatccaactaattaatcactattattaagagggacttattcaaatacgaagcttaaattttaaaaatctcagaaaccttcacgactaatagaccctttaaacacaaaaagagtgtcaccattttcaacaccatgccaccgaagactacaattctctcgcataatccgttgcttgtgtacgaatatatactcgtctcttggcaacgtcttgttagcttgtaacccttctcgcatctccgagatggtgcaagtgtccttaatctccactggaattcgcgcaccgttgaataaactcgatgacgtctgcaccaagaaacagagtttccttaccggagcgacgtctttcgcacggttgattgacttaagaaacaccacaatctctgagaattctgtgattccatattcgtttaggtttcgataatcatcagctagctcgatcccagaatagtataactgcattcgctttatcggtgtgttctcaacaatgtgaatcttgtcctttaagctacttacctgcaaaacattagtagcttgttaatcaagaaatctcaaaaactgtaataagatgggaggtgaacatgttgctagtattaccgtttcggttctgtctacttcgacggtgaactgttttgacgggaacttgacggtgacgtgaattttcctaacggcggcgtggataaaagacggtgcggtgaaaaggggagttacggtgaggtcgattctggtgccgtgagagatgattgggtaatcttcgatgtcaagaccgtcgatgagttcccaacaagagacaaagagagttatagaagatgttggtatctgaagaaactgtcctagacgtttcttgacctccaacacagattcttgttcgctgatttccattgtgaattcttgtgtgtatgaaacaattgtcactatcatattttcagagtaaaaaaatgtgttctgatatgcttatgttatggtgaaaaaggactatgattccacaatgcgtaatgtaaatatagacgcacacatatatatacagtggagaatgcaagttgttgaaatgcataagatattcatgataatattctgatgtttagttgggtcttgtttgtgtgtgtgtctgttatataacactatggttctcgtcgtgatagtaactgaatttggcatgatattcgattgtctagtttagcattcacagcaaaaaaaatgaaaactgaaaataataataatagatatatagctgtaaattcaaaaatttaaggtttgagtcacggaataaatatgatcctaagtaaaaattcgagatggttaaaaaaatgaattagaagctgagttgatacatggaatgtgaaataatttattttgtatagttcttatatgaaattattcatcctaaaaccaaaagtagataaaatcatgacagcatatgtttttaacaggttctgaaattttatgtcagcataagttttatcctcctcatgagaaactcactctaccttgagattaatttacttagcaagatacattccggaaactatggctgttccaacgactacaaccaccatatatttcagaatattctttacagtaaatatggattcatttgtcggtaactccatcagttcctttatctgcaataccattagcacagtgatggtgacaaaattagctctgtttattgtgttgttttcaaccaaatgtgtattaatgaggttactaacgtttatagtttggttccaattcttcttgatcccttgaagatgtcctctacccacaactgccacgactgaactatgctcacttgcaattctcaacaattgatatgccatgtacctgaaatataatgcaagttttgcaaatagatcagacaaaaatttggataccaaactgttgacttttcgatgttttaagattagctaattaagagctcaaaggaaacaagagcttgaaagctaaatttgatacaaagtggaagaggaagtggtcgattaatcttgtaaactctatattagagaggatagtatactaacttatctcgctcatgcacaagtgtctccatgagagtcggaaattccgtgctcatttcttgaatcgccaatgtcagcatatccccatcgcccaggtctttcagctaaagccatccaaacttatcatcactcaatatttcctctgactgaatcacaaaaatggaaaaaaagaaggaagaagaaaagactttaccatcttctcaagttccttagggttcggcagaaagacagcttgacttactatgctatacactagttttattttatgccatagaggcatcttaccccatgttctctgtaacgtgatctgcttcgacaaatatgaaagaaactgaatactcactagaacacagtataaaaaacagagatgcacttcataacattcctataagaaaggtttgaattatgaacaccaaagtcacctgtactgagcgatcgccaagaaacactctgccaccatatttgtttgcctcttcaaatcccacacgaaattcagcaccaggaaaaacctcaagcttcttggcggcctacacacataagaaaatgatgtatattattagtctggaaatttaagatacaagcaaagtagatcttaaccacagaagcatgcctttgcaagaatatatccgtaaactatttcaaataggttgtgtttcttcttccacatgtatatcatttccatccaggttggtggttcctgtcaaaccaaaacattgcacctttcaagaataaacaaaaaaaatggatagaagagatatagattcattataagttatgtcgacgaccataatatatatgctaagaaatcaactgaactggccatgttataagacttgacaacaaaccttcacagtctgaggtgtgagaatagacaatcgacttgaacacaactccaaaaagacagcctacaagcatcagccacgtactaagaagtgagtaaaataacacatgaggatatagcagttgagtcctcaatgaactgttaggataagaacctgtggtttcaaggcgctgattacagcttcaacttctcgacatgattcctacaaaacaaatgcaaatatgaaaacaaacttttttttttttttttcgtcatataaaaacaagcttatgaatgctaatatattatagtccaatcaagggttaaaaaggggattgaaaagtttccatcattatccaacatttcaaccaatcacaaaaccagtcaccaaattctaagaagcaacttacaaattcctaattatggaactaaccgaaattgaaaacgaggattacctgtgatacgtgagcagtgccaactaagtacacatcacaagatccaccctcagctgtggattcgcacgttagaaccataacgcttttcgcaaattcctcaggcagctccaacttctccgtcgtctccaccgccacacactcaacataatctgctacagcgcatatatcaccatcaccactatcacatatcgaatggtcgcagataatcactgaacctgcgtcgctatctgcttcctccctacgaaggtcctccttgtccacattcactaagctgttggttaacgaaaaatctccatattgaacctccggcttcaactccattacgcgaggagtgattggcggaacaggtaaattcgaagattctgacggacggagaatgtagtggtgtggaacgagagagagagagagaggaaacgttacgagctaagccaaatgtatgacaatggcagaatcgtctgatcgtcgaaggaggtaacgcttatttttttatttaattaataaacttttttaaaatggtgaaaaaggaatgaaagaaataaaatattattaattgtgttattagcacctatgattgaagttaaaaatctctaattaattaattagtaatggaactttctttcaattaatagagaaaaatctacctaggtgttataaatacaaattaattgaaaattagggaattccccttgaaattaatttaaaaatattgttgtgcttggaatgagattctactatagtaatcattaggcaagaacacaatgtatctcactttgggtcaacttaccttagatgaacatattagtcaaaaaatttggatgagattttcttcctcttttatcattttagtcaatacattttacgaatcttactttaccaaaaaaaagaaaagcactaatattgcttatcctaccagtcaaaggaaaattaacaacccaaatctctcattgaaggaaaaaattaactaccaaattgaaaaaggttaatttaaaataatggaaaaaaacaaaaaatagtgaaagaaaaaagtaaaccattcggttcgattgttttgtactttagcttcggtttatcaaaataagagctgaatctcattcggttttcggtttggaatttttttttggtagcaatgaatacctgtcttaggagaagctaagaatgtgaggatgttgttgccagaaacattggtcgataatgtttgaatagtctacgcccacttctgcttccacttgctttcctgaaacttctccattctcctctgtaacaccttcctgcgtctaaatgtaaaaactatttcagaccacttatttcagaccacttgtttaaaactatttcagaccacttgtaaaaacaagaatgccttaaaaggtttctcttgaaaggacccttcttttcttcacaataataagaatctgctatgaaacactagaaggattttggagtatgataataaaagtagcacctttaggcggaaaacggaagaacccatgcggaagattacaggtaatgaattgtactcaattccaaattgctggctaagtaactcgtttttttctcgtgtctgggtaccctgaaacagagccaaatgtaagtgacaagccatttattcattgaactaagagggagcattggctactcgaacaaagcacctttaagtaatcctgggcttgaattttgctttttccagacttaacaagcatccagaaacatgtattatactgattgttgatatggcctgcaagacaaaacaaaattgctgaaaggagcatccaactcaaactacgagtctatttgatatcaagcaacaatctcacaagacaagtgaatcatttataagacaagtatactcacagtcgacttgtctccaagctagataatccaggagaatatctgatgttggatagcaaacagctcgtccatcgaatgatggagggtacttcaattttttgtgagggaaaaaatctccccatctcatcatgtaagtcgatgtgaagaaggatactactgcagatattatcttactgtaacaagatatagaaattaaagttataaagactgaaaagaacaagaaaacctaggagaagacagataagtttatcctgcaacaagaaaacttaagggcatagaaaactagtctgacctggactgtcttttgtaaagctcagatttattcttaagaacaaagctgcaaaccaaagatgaactcgattagtatctagaaatgtaaacttggtttaaaggggctgagagttacatacctgaactcatcactaacgccgtaggcaaaggcaatatcctgaaactcctcaagaacagccactgcacatgaattcataagtttcagagcttgctcatcatttggcttctcaaattcatgaacttcagaaaatctatcaaaatccaaagcaagctctatgagtttcacttacaatataacgatagtaatcattcaagcaataggcaggcgtttgtttgtcaaagctgtcaactactgttcttatatgttttctaagttccaaaaagtagaagcattgcctaataaatcacaatttaaagcagagcacaaaagcaatcgcaatgtaagaatagaccgaccatagcattcagaagtgtataaacttgtaatatagcattatagcttaaggaaatcgtagggaacatatgtatattttttaacaagtctaaggcttccatgcaagacacattgtctaacaatgaaaataaacaaagactaaaaagcatattacctgtgaaaatggcagccatcaatcctaaccacaacccaagttaaaggtaataatctactctcaaactgaaacgacttaacataatctggttcaattttgccaatgtcttttgcaaaatgtccaagatctttatgaagagaggagtgctcattccaaaagcttcttccagcaacattttctgaatgcactaaagtttctcttctcctcaatcgttttacaggctttccattctcatcatgctttacagtttcttccaactgaataaattcaacaaaagtatcacacatacgatatatacattaaacctgacctatagagacaagagaacatctgacttttacatttccaactaataaaattgattttgtaaccttaacatgcaagatgcagcgacacaagactaaataaatttacaagatttcagtcaactgaaatttacaatgcaaaaacatacatgcacaccaattaaaacactcaacaaaaagaacttactaatcttcataacgattcaagttaccaattgaaagctcttagatttctacatacatatgcaacacatcacaaagcaagtattcggaggctagaaaataaaagaatgaaataatggaaaagatcacctttgtcttaaaaaggcatgatccttgacgaaataatacaggaagcattttataattaataccaaattgttgaaaaagaagctcatttctctgttgtttctgtgtatcctgcagttatcaataggaagtagtgttattatacaataaaatatgattacaaggtatgaaaccaggtgaaggtaaaggaccatatatctaaatcaaaaattctagtcaaagtgctaagacaacacaccttcaaaatctcctgagtttcacttaaggtctttccactttttactaacatccaaagacatgtgtcatactgattactgatgtggcctgcaatcaaaacaaaggaatgttgaaaaagttctagatgaaaacgacaataagaagtaatagtatccagagtgcagaatatcatgaatttgttaaggaaaacttcatagaacataaatagatgttagaaggtcttacagtcatgttgtctccacgcaaggtaagcttgaagaacctctaccgatgcacaacttacaacttttgaagcaaatgaaggagcatattctaattttgtatgaggaaagaactctttccatttcgttacatagaccgcagcaaaaaatgaggctaccaaagacagaatcttactgcatatgaaacagcataaaagtcaaagtagatgtcaaaattcaaatcatacagaagaaaactaaatacaagtcgagctatctcccaaatcctgaaatacctggctcgtctctggtagaatcttgatgctttcttgaatacaaagctacatgataatatatgaaaacaataaatcttgtcacaagtactagtcaaagctaagtcaagtaaagtaatccaagtgacaatggtacctgtactcgtcactatatccatatgcaaagactatatcaggatactctactaaaaccgaagatgcacatgaattcatcaaatttagagatgtctcatcattaggcttttcaaacttgtgaacttgagaaaatctacagttattataaggaaaaagagagttagaaacagaaggaaagccttctcaaacacaatctactatgaataaattcaagtaagttcccaaaacaacctatcagactctatactcatctcgttcacaatctacacaccatcactacttgttgggtgcgcagaaatttacctggaaaaatcacggccatcgatacggataattatcagattgggaaacataacttcgtcttctacttcgaatgacttcacgtactcgtacttactattcgccatattttgaatgatgaagaaggctacaaaagaagaaactgaagttctaacattagactctaagagcatccacaatgggaggttattagcaaaggttcttagcaatattttatgaattgattttaaaaaaaattgtagtttagattttgggtagaagttttattttttggcattgtgcaatggtagtgtattaagttggggttcttaagaaaaaataaattaattaatacactaataaacaagtcataagactcaaaccaccaactggttagcttaacaaaagtagaatcactataagctaggatttgctctttagggatttgaagctcataaaatgcatcatcaacactagatttcactacacgatattgaatcaaacaaaccagctgcacaaacacattatcctacaacacagcaacaacaacaagaaaaaacctaatttacatgaatctcaaaggatcaaaaggaataagtgatcacgaaccttagttttggtttcaattttggttacatgtagctaacagagtcgactgcaaaaaagaaacaaattgaaaagagttaacacatgatgaaactaaatcaatgaaacacaaaaccaaatatgatcctcaataatcaaaaaggtaaaaaagaaaagaaaagaaaaaaaagacagaacgcaagtaatgattagattagccaaatcaaagagacaaatctattgagaaatcgattgagaaatcacgaaatatctaattactctgaaataacaattctaaaataaaccctagaaccaaatcatagcatcgaaaaccatatatctccaaatagattcatactaatcgcaatcaaaatcaatgaaaaataattttagagcttaggggatcaattacaataaacaaacgtggtctatcccaatttacaacctcaaggaccagaagataaatcaaacgattgacatagaaaacaagtaattgaataaaaagatgaactgagaaacaataaaacttaccatcttgttcaattgagattgataaaatcgatcttcctagtctcctcctccttgtctggtgatgttcaccgtcggggaattcgataaatagagagagagcaagcgtcgacagactgaagaaacaaaaacccacgactgtttttttttctttccttttcttcaattttcagacaactcacccatgccacgtcaccgcctcttaatataatttggccctcttatataagagcgcctcttaaattttagcccaatttgcaatttaattttaatcacaaaacaaccctaaaaacccacctaagaggcctgcgttaatgatggtctaagaggtttccagtttctcctggctttgctgctggaccatttgacagctctaagctgcacagtgtcgatatagtagaggttatggagattacatttggggattcgcggcggatttgttggcggcaacggccgtggggagagttgataattagagagtgtttggtgaatttggagaaatgaaaaagtcgaaagtacaagaaaattaaactttcgggtaacattgaaagtaaatgaagaaattgaggggtcatttcgccaatttagttattttaagtggagaagtagtaaataagttctatgttccgtgacattgaaggtaccatcagagacaaaaaaaaaaaaaaaaaaaaaacaaagcttgacaatgacacccataatttacaaatttttcaccaaggtttcgaaagtacaagtagaacaatcactgtatagctggggggtcattgtcgaattcgtcatcgtttttcacaaatctacctctgcttcgttttttcttcgcagctgtttgtgctcgactttcatatcggtgtgccttcacgaatctgcaaagattcaccaaaatcctcaataataagaagatgaaatcccagccctaactagaaagctaaacgaaacacttacttgcgactcctcttcttctcaaaatatctctgttttgcttcctctcggtattgatttctctggatggtcaatggatcaagttcatttggtggtacaacttgttcatgatgatcttgttggttttctgatgatgatgatgatgatgatgatgatgatgatacctaatgacaagtgtgattaatatatcaaatctgtaagctttattgcaaatttcagaggatttaccgaatgtggataggtccatgtttgacattaccactgtagaagaggaaggtccagagtcaaaagagcctatgttcaactgattttcatgccacataggtagatttgagctgaattgttgttgactagaatcagcagcaattgaagaaccaccaccaccaggctcattgaaattaatattaagaggtggcagtgggaataacgtctgaaattcaactgatggtgtgtatagttcctacagaatatgataacaacatatattaccaactcatagtcttataaaacatggacacttttgagcagatgaaacggataagatcatatttgatgatacctgatagtgagagtgtccacgttgaagctgataagttctgttactagtttcatataaagaaccaatgggctcaccatatccgaaattatgtggtggcactgtgtataagttctggttcgcttcagtggaggccaataaagaatttaagctctctgttgcaaatggtgtgtttagttcctaaagcaaatgatgatacatatatattagcaacttattgtcttataaaagatagacactttgagcagttttcgaagggtatcgattagatacctgatagtgaaagtgtccacgttgaaactgagcagttctgttgcttgtttcacataaagaaacatttggctcgttgtatccaaattgcctagactgatcaagatcttgtatagcgtgtaaactagacgataacggcagttgtggtggcggtggttggtactaagagaaatgatcataaaccgtgttagaaagatggaaacttgttgaagacagaaacgaaaaaccaaaggaaagagagatacttgaaattgagatggtacaggctcgggacgaggattgatgttcaacggaagtgtcgtttctgcatctcctagtaacgctggtgtctaaccaatatggtgaatcgttaaacaaatgtgggatctagttatacaatgaaaatgtaacaagactttacctctggttctccgaatatcttgagaaaatcctctatctcatcataaaaaccctcccaatcccaatcatcattcatgttaacttctttccaaagaatctctatctcgtctcttctatagtttcgtttttagggtaaaacgcaggaagcattacaaaaagatgaaaatagcaagtcttgaatgagcagctagggagagataagaacagagttactgtttacttgagatcgatcggagagggagagacagagatttgagaaaagagctaagaaagagatttagtagaaacaacaaagaatctgcagaaacatacctatgagcgagagaaagactaaaaagtgaatcttgatctaaatcttgacgagtgttcaaaaacgatcaacacaatctctgtttctgtttctctttgcaactttaaaagtttaaatggtttatatagggtactaaaccattcgactaaaccgaaataaaccatctccgctaggtagagaatagtaattactttatggttaactattattttttccccttcagtgaagtcattcgtacaataaccggaaaaaagggtactaaaaagacacaattattttaatccgtcgattagaaagaaaaaaaaatgttaccacttaccttttttcgtctatcacattttcaaatgggatttgaataattgaaagcaaaatatatagttaaaccttcaaaactttaaatactagacgaatacacaaaaccatagtttccagaaatacttttctttttgctcttaaaatcaatgaattcgactataagcctcaagtacagaagttatgaacttatgatcaaaatcagaatttgatgctcaccactcatccatctttcgccaccacgtggagaggtcatggagaataccttgaactgtttatcaattggatcgtatcccaaatagctttccaccgtaactctcctattttcctgagctagggttatatatcaccggcaccgttttcatcactccttttgagtacagcttctccttaatacagaccaagccatgaacaagaccactcatttcactggaccaacgaaaggagaacttcatatgataattggcgactataggagacgagtcctcattaggattttcaaccctaatattggacatacatcgaattaatttttatattagtcttcagtttcataatagattagatgtatgtcccatataaattgtaataatgtattataaacggagatagtggtaaatttcacaagaaagcacccaagtaaacacaaacaacatttccctctacaaacaaatttctctccacttaaaaaaagaacacttagaacaaatgaagcatcatagcaaccatgaatccaaatcctaaaacaagtgttttcgcggcagaggaggagtcagccggaggagagtctgcgccagcaagatcggccgttgtaccggtagtactagaagggaaggtcccgacggttttggtggatgttgtgctgctagagctacctggtgagcctgggaataacggcagagaagtccccgctgcagtagccggagatagtgccggagaaagtggaggaatgagaggcagagaggaggaaggaagtggagtagaagaagatggagagagaactgggacagggttaagaggtaaaagaggttgaataggtagaacagaagaaggtgaaggcgcgtttagagatgggacggtgtttggaagcggtgcggttggtgctacggttgcggttggaacaacgtttacttcaagtttcatcccttggctacaatgtcccggcattccacaaatgaagtacctaaacaaaatggatcaagaatttatatattgccaatcatcatttggtctttaattcatttgtatgtggaagtagtattaacctttttccaggagtagtaagaggaaccaaggagtttccattagcaaacgttataagcggtttaaccgcttgacagctatcgaattcgggttttgtgacttcaacgacgtcgtggaacgcagcagggtaggagaaaactgtttcaagcaaaaacagagttttggtttttagtcttttttttttttttgaatcaaagtttaagatagagatgtgatatatcttaccaagattgtctccaacagcaaatgtttgtcctgcagcccaagttcgaagactagctcctacagtccaaccactaggaccaccaatggtatggtcagtagctactgttaaaccaatgagtgtagtagcgaggaccgagattatgatcagcatttctctagatgccattatcttcttatatcctttttctttttgggggaaaattgacaagagaactgaaagatagatcaagagatgatgatgttttgtgcatgacatatggtgtcaaatgtgtgtctatataggggtcaaaggaggataaattattgagaagaatcttttgagataagagttggtaaataataaacttgtgtttgtatctgttgagagttagtatgtatgttggatcaagtaagcttttctttttttggttttacctaatccactataaaaccagacaatgttcatgttgctacacttgtccaaaaccagtttagttgcacctaaagcaagttcctttaatgctttatagtttatctcttacaagaacaggtgaagttaatattaatacaagagaaattacacaattacacatcttcatgtacattatagagccagtgtagtctctctctctgtaatggaagttacaagttacagtataagtaacagagtactttgtatgtgttgttattcaaaacttttcagaacttagcacaaaacaacaagaacattgagatttttatacaccggggctgtgactatgcgcgagtaatttctcatgttcactgtcgatatcatgttggagtgaaagaggattagattgatgagcagtatgcttgggattgttgattttataccacacgttctctatacggaaaaacgcccattggaatcgcctgtaaatctccaaggcagtgatgatgaagaccgttatgtagttgttacggagatgagcagataacttatatgtccatgtccaccttagtaccagattgcttccgattacccaaacatatacctgcaaaaccacaaaatccaagattgttcagacacatttggctactgtcgttgaagatttaatgaaaaaatgaaactatatattacccaacggcgtccatatagtagatgggagaaaagatttggtctggtgaatttgaaaatccgagtgaagacactacaagcaacaaagaggtaagaaatctaaatatcacactgaatccaagattggagtaatctgttttacattcacagtaccttagatcccaatcgcgtaatatatcccaaaagaaggagaagaaagtgttagctagaccagagaggatccatgccggctgtatggagtaagtccatgtatctggatcgatataatacttgagggctgagagaaagatgacaggcaccgctgttaaatacttcccagctgaaaaacaaagacaagggagagatgttagaaatctagcagaaagccaaacacaaaagaatctcttggatttggggttattaccattgtagatgtttgcaatgtccttgctatctttgtactgacgaatgcattggaacagccggaaaagataaggtagaacaagaaccaagggaattgcagcagaatgactcccgcaaaccgaatcagcttcaaaccatgcaacagtagccacctacaacgaatttatcagatacactgagcatttgttatgcataatttaaccgtaaagaagaagaaaacttactgacctgtcgatggaccatacgacatactgaacgttctaaatccgacaaaacctgcaaaatatatttgttgttgttcaacaattgcattatacatatatataggaaagacaaacaattgtgttacctttgacattgaagtcaggatatcagctagaaagaagtctgaaaaagtcactgcctgtttgtgatacacgaaaggatagttagatgatgtaagtgaatcttcaatagaaaaaaaaaacaatagtattcctttacatgcacagggaagagtattcgccaaaaagtccaaagcaaatagtagcgagacgacatgtagaagatattgaaagggattatcagaataatcacagctgagaaatacaaaaccacctggaaacatccgaaaaggtcactcttatgaaaaaatgaatcaaaatctctttgaaacaactttaagagaagatgcatctattacactggttgagatgcagccaactttacatctccgtgcgagtatagatacagataggcagtcatgctagtcaatataattattgtcatccacctggcacactgtgacatcggttacatagatgtaatcaaaatatatacaaatgatctaactaagagttgtttaccttccatatctctctgtgactaagatgatctgatcctagataaaagattgctgcataatctactccagaccgagaaaaaacccacaaattaacaccccagagccagaccatcagcgtctgaacaaaatagcatacatgaggaaacacacttgaagcaatttgactttactaatttgagagcagaaaagtaacttacaatgagaaggagagggttataatacagaaatgtctcataaaagaacagttctcttgtctctacgcccattttcattacagattccaatccaacctgcaaattttaaacattgttgtatattaccaagactgaaaactcaaacaatggcttcaaatcaaaatctaagatcattgtttgcaagaataagagttcaaattttaacctttccacaaacataaagaccaccaatatacagagcaacctggagaatcaagatagcgaatctcaaatcagctagttagatgatataaagcaggaagaaaaatttgatagtatggaacaatcagcgagaatctaagaactttgagtaaatgaacaaaaccttgagacttcgaaggaatataggagtttgcaatttcgcataagtactcagaagcatacttgcagtcttcaagtcattatctcctgtccaacaccacaaaccatccagaaaaaatgtaatcaaaatcactaagcagaaactgatttttctagtagccaagatttattataaaaacaaaaactaaccgagattagtgacgatgtgtctacttccagatttgcgcaagtgaggattattgacaggcatagacaagacacccccaaacatagatgccaaagacaaaaactttctctgtctctagttttgttctgaaaccaatcgcaaaacaactgacatagcttaaaacctaactcttacgaaattcaactaaaactagtgtctaataaccaaccacgaaagtgaaagactttacaacgaagaaagacaaatgagtaccttccaaaacaggaaactttcttcaccaatagcttgctgctactctgaagaaggcgtcaacactgctcaacatgaacaatcgcatcgagatgatgttaaacccaattgataccaaagaaaataaaaataaagtaaacccatcaaaagattcaatctgaatcacaaaaaaaaaagtcgatggctttattgaagcggctgagaaagattcaattaaaaccctcttttgtattttagcgaaaaactcgcattaacaaaaaaaaaaaacgtcttcaattttttccctaaacgtcaaagtgtacattgcattgagtttcctcctatgaacaattcacgagatgagtatttacgttgtaagaagaattaaggaagacttggaaggcaaaacccagaaaaggaacaatcaataaaagtcttaatggagagaaacgattttagatgaaaagagaaacgttgtgatgattagattaatagcaaagacaataatcaatgaaagcgagacagagggataaacaaatcgaaagagttttttttttttttttttggttaagaaaacaaatgtttttgttttggtcaacggcttatgcaagttaattgactttaacaattcttttgtcttatcaaagcaaatctcttaaatcttaatatagtactagattttgttcatgtaaagttgaaaaatcatccaaaaatggaagacaattacataagatttcgtatttgacaatagtagaacattattaatttattataatcattttcacttaatttgtttacgtttgttaatttgataaaaagctaaaatatttcacatataaagtaagaaaggtacaaaagaaaaatagtttgaattcggtttttcctaataggttcatgatgaatattttattgtctagatttatcgagttgttcgtagttttgataataaacttcttgtgcgtcggggttaggccgagttgatttttctaaaaagaaagacatgtttaaaaaaaaaaactaaaattcttaagtgaagtaccatttgaaaatttctacgtgaagggaaaaaaaagataagttaatgcaaacaccatgacgttaagaaaaaaaagtcaatgccaacaccattttgttttggtcgacggattagataatgcatattgtgcagacgtattacttctttgttgttacggtaccaatgactcgatagtggtcaaccagattggtgaaaaagcccgaccgaacataaacgagactgattttgtcctacatgggcttcctctcagcccttcacgtcattcggtttctctacttgagatcaactttttctaaaaataagttgaaatcgtggaagagcagagccgaagccgcaaagccctaggatttatcattggaggatcgtcttgcatgcctatgcaatatgcgaccaaggacctcacttaatggtggagaaataggcgacgacatgggaaagctccacacacagtttcttggatcatcgagtggattaacaaacaaatccgaaaccgttttccacaatccgacttctaggcgataaacgctatgataacggattacaagtttggtttgaaacaaggatctaagtgtaaaagtttctaattttctgctaaaattttctactattcgatgcactagttgtacaaacgctatgtttttctttaaatataatttaatattattttcaaaaaaaaaaaaaatttatagcgagatgttatcaaagctatgggcttccatacttggccatccctattttaccgtgatgttcttgaccagatctttggctcgcccacagctcttgtttgcctgcaaaaacaacgatgaagtatttttcttctcctcacctcagcctcataatccggatgagaagtcgtctcatgtagccgccactagtcacatgaaaattccgtatgactttgtatttgaaagattcagtcctatcagaggtctggtctttcttagaaatcataagatatcttaaatggaaagaagcagaagttgtcggtgatatgtaatcagaggtctggtctttcttagaaatcagaggatcttatatcgaccactgtccatggaattgattatttatcaaggcacgatgagttgtctcaggagcatacatttttcattagtaactggagaaccttcatggacactgatcgaatgttgcataccccactatcctagtatcacatagatatttattggttatatgataattcattcttctattttccgtgaaactacaaaacaaggaataaaaacgtgactaaacaaaaatacaaaaaaaaaaaaaaaaaaattgggcaagaaaattatggccacgttttgttgatagcatacgaacgcgccagaaaattagcaaatttaattaatttcactgaaaaaattatttttgtgtgtgtatgatcataatgattccagtaaatgatttttgtagttccgtcaagtgcaaggtaccatgacaagcgtattaggaatgatgaaccctaatctgatcaacggaagaaatctccacaaaggatcttcaatttttgtacaagataaagaaactaaaaaacgagtccaatggagattatcaatcaaggagggatctctaagaacgcatcaagccactgcttcttctgcaacagaaccaaaggttagtagtaacaacaatctttgagcttttttttctgttaactctctggttttgtgtttttgaatcattaatcttgaaaacacaggcgacagagttcaatacgacgacgtatgaagacaaaatgttgaccaactatgttcctgtctacgtcatgcttcagcttggagtcatcacgaacgataacgttcttgaaaacgaagagagtctcaagaaacagctcaagaaactgaaacaaagtcaagtagatggagtgatggttgacgtatggtggggaatcgttgaatcaaaaggtccaaagcaatatcaatggagtgcttatagaaacttgtttgcgatcgtacaaagctttggactaaagttacaagctataatgtcgtttcatagatgtggaggcaacataggagacgatgtcaacatcccgataccgaaatgggtactcgaaatcggggattcgaatccggatatcttctatacgaacaagagtggtaatagaaacaaagagtgtttgtctctctctgtagataacttgtctctcttcagaggacgaacagctgttgaggtatgaaaaactcttgatcttagaacgtaactcggaaaaaattgcgtttatatattgatataatcgttgctctgtttctagatgtatagagactacatgaagagctttagagagaacatggaagatttcataagctctggagttataatagacattgaagtagggcttggtcctgctggagagcttagatatccttcttacagtgagactcaaggatgggtttttccaggaattggggaatttcaagtaagaaaaaggaaataagactcttaatttcttaggctttgaaaaaacaaaaaacagagctttttaagtttattttgtatgactttttcaatcccagtgttatgacaagtatctaagatcagactatgaagaagaagttagaagaatcgggcatccagagtggaaacttccggaaaacgcaggcgaatacaacagtgttccaggagaaacagagtttttcgagtactcgaatgggacttaccttaaggaagaaggaaatttcttcttgtcatggtactccaaaaagttacttctccatggtgatcagattcttgatgaagctaataaagtatttctcgggtgtaaactcaagatagcagcaaaagtaaatcaaatatttgtaggattttcctttgggatgaattctaaacatgattaagatttatagttttcttaatttgttttctcaaatttttaggtctctggaatccattggtggtacaaaactgaaagtcatgctgcagaacttacggcgggttattacaatctcaaaaacagagatggttatcgtgcgattgcgaaaataatgcgtagacatcacgctatcttgaatttcacttgtctagagatgaaaaacacagagcaaccagcaaaagctaagagtggacctcaagaacttgttcaacaagtaagcaagttgaatctgtaaataccacacttttgtatattcgttacttgaattgattttggtaatggttaaaatttgaaggttttgagctctggatggagagaagggattgaagttgcgggcgaaaacgcgcttccaagattcgatagaaatggatataaccagatcatactaaacgcaaggcctaatggagttaaccaagatggtaaaccgaggatgtttgggttcacatatctcagactgtctgataaacttctcaatgaaccaaatttctcaacgtttaaaatgttcttgaaacgaatgcatgcgaaccaagtaagcaatcaaaaagagccctcttcgagatgtgtatttgctccaagatcatttaacatttttctgaagttgtgtgtgcttttcatgattcaggagtattgttcagagcctgaaaggtataatcacgagctgcttccgttggaaagatcgagaaacgatgaatccttggagatgtttatggaagaaacagaaccatttgatccatttccatggctggacgagacagacatgagtattagaccctttgagagtgtactgtctctattgcgaagcacatttttgagaaagaagtcctagagaatatgctaaggggaaattctataaacgtataagatttctgaagtaaatatgtaaagatttgagataaatatataaaagtaaataattcatcctaatgatataaatttgaaccattagttttctgattacaggatatgacaactgtagacattttgaagttaaacaacagaaaaatcagttttcatacaaactcctttttggtcggatttcagaccagatcttcttctggtagtaaaaaatgtttgtgcaattctctacttcatagtgccatttgatactctcttctataaaaattattctattttcctagaaatcagttctacagatttcaagtttcccgtgacaaggattcacataggtgtgtgtgtgaaaaagagagaacgagagacaattgaattaatttaaagacccgaagcaaagacaagattccaccgaatgtcattatcactagtgcattttaaccccacatgcgacaacagagcgtgacataaaagcttttccatatttttcaaaatgacacagctttcaaaattacaaaagtgacttcgaaataagtgaaacgattcataagaagaaataaattgaaactaggttatatgattatacataaatatagtcaagaacaaggacctacctgttccatcattaaccgtgacactttgtcacttagcttcatctttggccgcagtggcagaaacgtaataagcaacacagaagagggcatgaagaaaacacaaaatccctccaatggagagaaaatggtgatgtgtgaatccacaagaggatcttgacttactgttcgacatcgtcccaatcactatactcccaaatccaacagcgaatacgatcctgtgattacaccagccaatcatgtcattttacttggaccaacaattattaatgccaagaagattttgtattaacgtaccaagtgaggacaagacaagccatggagatttgtctagtggaagaagatctttgaaactcgtcttgagagcaaatacaaagacagcctccgaccaagttaagtaggacatgagccattaccaatatcgcggctgcacctagaccgagcctgaacgcgtcctggctcggctctctgcactcaaataaccaaagcctcatgtgcttcacctacaatagaggaaatcgatggtttcatttgttaaaaaaaaatctattaattcaggttcctaatgtttttttttttttttttgagaaaatttctaagtttgagacagtatgtatgttatgcaaccatcattaccaattttagcatcataaattagggaaacaacatttattaatttgaaagagaacatttattttacctgattttgggcgacttcagcttggattccgaggattgcagcagctacatctaagcccacaatgactagacaaacaagaatacctcctatctttgtcattttcaaatctcttaacttagtaggatttagttttgttggagatactttaagaagatacaattttggaaaatgtgaataaagaacaggagaagcttctttatgagggccggggaagaatattagttgaagagagaatgagaatgggtagtggaaagtcttaacgagtaatgatcttttatgacaaaatgggttggtggtatatatataataaagtcgtaagtaaagttgtgagggtgtggaagaaaaagagagagaaagagatagaagaacaacaaatatagacaatgagagaaaaagatatttctcctgttggatatttgtatcttttagattttttagcttaccttttagttgaatgtaggaaatgagacctataacgttatatcattaactagattgcaatatataattacactggataattgatcgaatcagatcaattataacccctttttttttttggtgaggctcaattataacctttttgattgatatttaaaacatccaagttaacatgaaaattagaaagacattagtgtctcttatgaaatatctcttaatatatgctaaatttaaaattatgaagcttttttgtttgtcgacaattttttttaattatgaatcaaaatgataaataattgtattgcccttaaaaattaaataattgtattgatatttttatttactctttagtagatatataatttatttatctaaaattactattcacaaaaaaataatccttttacttctaaattatcatgatagtttatactttatctacttttgtaatgaattcattttagtaacttattcacaaaatttcttactttataatattctagataaaaagtcgaacaaaaatgtttaccgaaagcaaatctccgatttggattagtattgttgattttagtgaaaagacataaagctatattttcgtttatatttaatacgattgtttgctacataggtaatgtgctttagcaaagacataaagctattacaatttgatgttgatgtagatagaaattctagtagaaactccgaacaaatataggattaggtaaaacaattgaaatgattatcatgggaatataatcaattttttaaaaaaaaaggatagaagaaacatggaatatgattagctgggatatgtcaaaaataaaaaagattagctgtgggatatgcatgtgggtactttggcccaataaagcttctttttgtccatatggtcatggaatggcgaattcgctttaaataaaaattatcgatttgttaattaacatttcttcaagtgaataatttatagttgctttttatatatttatttggtttggttaaacatggttggattctttgtgttgggggggaagaaaagtagggcataatacaacccaaccaagcatggccaatatcttcacttctctgttaaagaatcaaatttatgttccttaattccacagtaattatgtagagaatatattatttataacaacatcatttgacaatatgggaaaattttagttctaacccatagtcggaactcgcaaaatctccgaactaaaacagttcatataaagcggttggcgtctcgttcactaaacatcattttgtcatgtgaacatcatcgtggttttatccaaacaataatgcaataatccaaatttgtttttgaaaaaaatgaatattctaatttctaattgttaagttgtgcttcgaatcacgcggtttagtaatggttgtgtgacattaaaccgaatttgtattttttttgtttaaatattaaaccgaagaaaaaatgttaaaccgaagactaactgaaccggaattggctgaaaattagggttttactgattaatagagataaggttttttatgagccgtgttcatgttgttatcttgtacgatagattttttggccatgattcgtgaacctccggatttatggagctctccatgatcttgtgaagttaagtttatgaattgttcaatcccgctctcgccgagatgtaggatcaatatcacaccgattgatcttaactaataacttcttgtgttcatctacttctcttatctatcttctccatcattaatctatatatgttcttgagcatgagttgttagatctttgttctggttgtttacgattgtatttggtgtagtttatgcttcgatttaggttccagattgatgcaagaatcgaagaatgctatcatattcatagccccatgttacaattttaatggtggtggatactactatggatgggagtggatcattttgatggaaaggtgatttgtaactatggatgaatgaatggatgctaaagacacaatccatgtctaaacaaaggtagaatctggtgaaacacataaattgacttaagactccttaaaggttagtttgtgatataggaagacttaaaacttgataatctttattgtttgtgattacatattgcgggagaacattaattgcaacctcgatgtggtctactttaacaagattgtataggtaaagatcgtatctatatgcaactcaaattctatatatacgtttgagatggaaaaatcaaagttgtataattgatgtgaacattgatgatttattctgaaattggtagaacatcttagcaatcttggtgtagctatatccaaagaggttcaagctatcctctcaaaatctcattgcctcacaagtttgatcaacttaatgaaacactttaggtacggtaggtactctatatcagcttcgatgaagtcattgttgcagcaagctctaagaagaggagagttgtgtgattgtagtaggtctcataagattcaagttgattaaacatgagtgaaggtcagataaaagggatgatgatttttatatcatgaactaggtcaagaacaaagactaaaatcacaatgttgttttttggaagaaagaaagacatcttaaagagatctaaatttattacaaatggttttgtcgctgtaacactgtcctcgatacgattacaacaccattctaatttgctttgttaaagagaagaaaactagagacttcaatatgtaaagaggaccaagagtgaatcctggcgatactctctatctgtcacttaaagattccgacctaacaaccaaaacacaaatcattaatatactattatgatgaacaaagtatatatgacaaaagaatgaaatagatttcaataatagttcaagatagagaaaaagcattttgctaccatgaaatcatcggaatctcttcagtaatttgtttaaccaccaagcatgtgagactctcgagttttggtggtcactctcggtttcgtcaccttccaatatcggaggtaaagacggactccaccgtgtaggcgctgctgagtcacctgagtcagttgagacacctgagtcaactgagacatctgagcgaactgagtcacctgagacacttgagtcatggcctagcgatggctcgtcaatcacagcggaggtggaacggcaacatcgacggaatagagaaaaaatcatttgaaactcgactacttaaaatgtgattattagttcgacagtgtagagatttgggtttttcttttcctttttttgtgtgtgtatatatacacactttaatatatataaaaggtaattactctctttttttgtggggtcatatatcgggtgttagttgtaaaaaattatatcttttatagtagtaaatctaataataatattacctatttaaaatttaatatcacattaatattgtattttgtaattaacttaaaatgtcaaaaaatgattaattttacaattaataatagctgtaattgtaaaaaaggttatgagaataacagggaaacaatagagaacatgtgagtcaagattcgtgaatgggaatttgttgatatcaaaattttaaattggaagttttaatttggaatgtagtattttctttattatatatgcatgatacaggttgtacttatgtggtggagggaacttagtatatgttaaccaaaattttattcaaaaataaataaatatataaagataagagattaaaactaaccaaattaaataaaatagatatagcgatatgtatctcccacctacattatctattttcgtacgtacatgtatcaattaaaaaaaaaaaaaaaaaatctaatcttctaatattgtgacatatgatgcacgtatatgttgaattcgaacatatataaccatgataaattactatagtatatatatattgtatatatggagaacattgtttttcattaaggacgacaattttcggttcgtatactttgccacgctataaaaagttctttttcactttgccaaataacgaaaaatatattcaaaagtggtcaaaacacgtcactatttcctttatgttttccccttattgatggaaatggttaaacatgaaggtagtgaatttgttcgaataatatgttgatatattttgatcaggggcggttcttcagtagtgtaagtggagcaaatgcgtatggccaaaaaaatattttaactaaatttgaggaccaaaatttaaatattgttttaatgttaaaagtacttttttaaatccactaaaaaattagtatgagccgctactgtttttgatggttttgttttgtcatcgactcatctgtaataagattacaaaaaagaaggtttcgaaatatagaagacacaaaaagcaacggtcttttccgtaccgatttgtttttagggtatattttttgaacacgcatagaggataccaagatattgttgtgtcgaatctaaaacagataaaccaacaagtactcatggtttatgtaaaacccacttcaagaattattgtttagtttgcactttgctgtcactaaactttttaacttcaaacacgctcaacaacatgaaaatggataatcgcatatccaattcctttttttacgatttgaaagaaaatttagaaaaataataatttacatcatatgcaattttctttcgcaatgcatatataagggaagaaaattatacagttcgacacataaccggacaaggagacaaccccggcgaggctcttaaattcgttgacattgcaatgttcctgttagacaaattcaacaaaatatatttagtaaatccagcaaagacaatgtctataattttaatagaaagacatctaacatatgtattattttttctaaccagctaatatgaaatttatgaaaataataaaaagatagacggaaaccatctaatatatacgtgaggactaaccaggctctcttgattttgtagctgaataaaaccaactttttggtctttgatttcccacgtacgactgagaccttggccgttgagcgatcactctccccgacgtcctccgagatgggatataaagacggttgccaacgtgtggaatcctcactcgtgcgtcgtcctgactgaggagccagcaatcgctgatcaatcgtcgatgattcctctcgatccacagcattggaacgataacaatgactaaatatagagaaaatcatttcaaacttgagaaaaatgattagaacaaaaatctaaatagtttacttgaattttgggttcagcgacagaaggatttagggtttattatatactgaagtttttataactgaaacaaaaacaagttatgaggatccatttaacagtttctgcacatttatttactttctggtatagttttattttaggtttatttaatgctttttttattaagttatgttaaatgagcctttcaaaactgtttgtgttaatgaatctgttggatctttttcaaacgaaattttactttctacacactgatacggtttatctattattaataagttaaactcttgtatgtttttagttattacttttaaagttggacaacttacaaaagtcgtgtttcaaaaacataacattaatgaaaattgatgccatattgccatatgtttataaataagattcctttataaattaacgtcaatgaacaactagatatgaatgctcagaggagtatgagattttgtgtacttggggatgttgtctttgtcgaagccagtaaagatccaattatatatacacagtaaattttaaaataatgaaaacaatgaaaagatgtatgagtttaatgacttcttgtacaatatacatgtgatccacattggaaaattagaaaatagttttataatatataagcccaatataactcttcgtgttagtatgatattatctgcttagcaaagcgatattaacttcttaatatagaaaaatgaatttatttgccctaaacaataatttttttatgtgtaatctttttctaagataaagataatatataacacaaaatacatacataatagattatcacaaatcacgcaagcaagcaacaaatcaaggctcgttactttccttggacactgatcaatatacacaattgtaataatgttaaacatgagtacatgaagtgtttcagaaaatagagatctcaaaaatatcattgaaaagggggaaaataagaacaaataattcgaattcaaggtggccataaaaggccatgagcaaaaactagaagagttgaattaaagagctatcaagcccatttagccaatagagacatgaggccagcaccaagaaggagagcaatatgggccataatttgaagcccagtattggattgcattttagggtgcgtgaaatctgctgcgagaaggtcaaccaaagacatgtagatgagaatgcctgcggatgcagcgttcaaaactccttgaacgatcagagccgttggtgaagactcatcgtaagaatttgctattcccattcccacaacgattcctatcggtgtcgttattgcgaagaacgtcgacatgattgttactgacaaacacttgaattttccctgcaacaaaaaaatattttcagtattttgtagaccaacatttcaatttattattatcgatgtcatcagtttttaatgtgggtttttttaataatacaaaatgtacattttttatagattttgcttgctatttgacaagttattttacatacctataccatcaacgatttttttttctttcaaaaggaatcaatttaggaaccagttaaagttgaaaactatgcaatactgagtttaattatatcggaaatagagctttcattaaaggagtaaataatgaatatagagaagaggaaatatacctgagcaatacaaccaccaaggcctagaccttcgaagcattgatgaaacattaaggcaataaacagagcttttgcagcatctgggctctgtgaagctcctagtgatattcctattaccactgagtgtactattattcccaactccaatacctatttttagagtttataatatataaacacaagaatatcagtcatgaggtaatttcaaatgttacattacactttttgttctttttttttatattagatttcggacaaaagaaaattacgccatgtgttcgattgcattccaaataatggacttagtcttttttaatcttatatttaaaatatgatttgttaaaagctaatcatatgaaaagttttaatttggaatttcggtacttataaataacatgtgacggtttctaaagaatcaaatctcacattcacatgtccgaatctaattcaccgcgtcgacaagaaaataaaatctggcaaatgcatgaatttgtagtagggtttttctttctctagagaaaatataatataattaaagtcaaaaactacatatgcatgcacataaaatttatttaatttgtgtatggatctgatttttcatttttcgcatttttattttaacgttaaaaatagaattaaatagaaataacatattcattcacaaattaaagaaatgttgtgcatgcaacattttattttaaaaaaatttattctgcaaattttcgttctgcaacgtcattacgtgattatgcatttgttatgtttttttcaataaataaacaacaaaatattttgcctcttttatttttatcaaaaatcctttaaagtttcctaaatgttatcattgcttgtttccatttacaattatgttcgattcttagtattagtatatataaccattgaaattgaaatggaactgcacgactatcttccacatatcaattcatttcttttgttccaaaaaatcaaaacgtttttttttcttttttttgaaagaatgtaaaattatattcaaacaaaaaacgtttatacaatgaatgctacgttttgttttctctataaaatatatatatttaaactaaaaaaaactctatgatgatagttaaaggtggagctcaacaaactcaaaatctatgattgttaaaacgtggagctcaacaaacctgtgcaataactctagtccggagaatttggaccttctcggagtcaacggaggactcgccggtttctccatcactgaccctcttagacgctttgcaatgcgatttatagaaactcgaagtggcaaatgtatcaacggataacgtcaagatcgcagcaatcatcgcaataaatccggtgaacggaaattcccatgcttcagatgtcaaacatggagagttaagcatctcgtaagcctcaggcaagacatgcataaatccggtagccaagataactccggctgcgaaagctttcgtgacgaagaagaaacatgtttctggacgcaaagaagggaagactttgcctaacaaagggaaaagaactccgattatgccggctattagaactgtaggaattgcggcgatcttgtatttccgagctccggctttgttttcatggtcgtcttcgtgtgagcattcacattttggtccaccatgtgaatggccttcggcggcgttgacgacggcgatgagaaggagggagacggagaagaagaagaataagagtttcacgttcttagtcttcataatctctatcttattttaaaattagggcttttatgaaccggataggttggattcttgatgatgaaaagaagagaaaagcttggtatggtaatggaagtactgaatgtatatatacgtatattaatatcatataaaaatgtgtggtagtattaattttgttcgtttggtcattcgttaataagatattgaacttcttaaactaacaaaaactaaaatattcaactaatgattttgtatctcgttttgcccttttatcttcacgagatcttgatggtaaaattaattcaaactcaatacgtaattttttaggaagtataccatgtatttaaacttgttttatataataatgcgcattattagttacgattcataagagacaaatctgatcatatctaatgaaagtcaacttgaacgaattgtttaatttaattaatatagcaataatttgatattactatatcgtttgggtatgaaataggaaactcatcatgagtctcagagctttagttgcgtcctcgacttgggattagtccgcgcgaggataattgtaaatggggtgatgcgtctttttctcactggagggtttgttcatgcgttaggtaaggttgaatctgtgtacgaccagtaatcgtttaatcttgccgacgtgatgtcccttctccagggtggagttggcagagatttggggacactgatattctcatacaatgtctcgatgtactcttaactagttgtccatgcgacatgaataaatggtcaaagtatcccgggattaatatgatattgggaaagcttttaatgagtgagagatgcgtataacatgtttagttcagaagtatatatcgttcaaaattttggtgagtaattgagtattgatctggaggaaatgtctctaaatctttttgtaagtgtttgtttgttggattgttctcttattttcatatcccttctccaattgaaggaattttagtttgtatgaagaaatgattgatatggcttgggttttcagacaacatgggccgaagcctccgataacgattaactggaagcatgacatatgatattatgacgtaattaaaatgtttatccagttcatataattagtatatgaaatcaaaattaatttatttaagtcatatatcacaaaattatgttgaaaatatagtctcatagaaaaattaaatcttgtaaaaaggagaaatattattttttgctcttgtggaactcaagttaaagtggaattctatatgtcttctatgtaacagtattaattttcatagtgactacaaattaatatatgttctcaaaggaaaatgtgggcatcgtaaacgtagtcgagagcgactattatgaaaaaaaagagagtaaattaatatcgtttgcttcatagtgattagtttttcattatattaattcaaactagactgattcagacacgtcgtcacgagtaccctggtttacgatactatttttaaataattaagaaatcgaaaagatgaaaagatataagacaaagaatatttcctttttcttttttcaaaaagaatggcgaaagaatgtcgacataaaatgtacggacctatgtagcacacaagttgactcctctcttagctagagaaaaataatggtaatgaagcttaaacatatcaagtcaaactctaaatatgtcgatactatgactcattttttacatcttcatatgcttacatctttttatttgattcttaatgttctattacatatattcatacaatatccgtcttgacgcagttatgtatacacatcatctttctggatacagattatcctgtcattttcgtttaatattgttaatttttttgtcaacaaattctataagtatttaatctaacttatttgtctttatactaataaaattaatgtacaaattatcaaattacataatacatttttcaaattattatgttatagaaaaaaataattaactattttgactttactaactaaactttgtattgccattagatatttaaaatgcagaatacttatcctaatattagcatatatttaaaatgtgggtgtacaaattaatttgacaatctatacatgaatacatccaaattaatttttcataaatgtataaatgatacaatttgtatacaaagaagtgtggtgagcctaagttttcataaaagatagtccataaatgttgcagttatatatagggatgctctatctttcttccttttagcacatttataaattttaaatataacacttttaagtaagtatatgtactcttctatccttatagtaacgtagataaattttaaattgtttcaaaaattgtttgaggatacatacatcatttaatggtttacttttagttcattttgagtttcaaattatatgaggagacttaattttgagtttcacactttttgagtttctttttgattcaaaataatacagttccaaattaaccttaatatatatcttacttttttatttcttagagaaacataatttttctcaatcttattgtagttttcttcaatgtattcaaagttgtagtctaaaagatgaaaaagtcttgatattactgtaagaaaatgaatcttgatattaaaaactttttctttcgtcggggtcttagttgtctagtgatatgagttgcactggtgaaggtaacatatacatattctttttctaataagtaatttggggtcttacaattttgccgtttaagtttttgcttctgcatttgtttctttaagtttctctgaaactcgacgttggtaaagtcaaattaaagaaaaaagcaaaacatgggttctactttggtttgtaatttaatttcatgattcttttcaatataactctgattttacttacctaaaaattcgaccaatgtttatatatagtcaccaaaaacagatttaatcccgatagaatgagattttgaaaactatggcggttgctaaccgcctaagatttagtgagaatcactctaaataataacaaagatggtgtaatcatgacatgttttacttttctcttgacatctaatgttcaaatatttgccatatatatatgtgtaatctattgtttattttaaaggtacacaataaaattatgcgtttaagttatgtccacagtccaccaataatgtacacatagtttgatatcggaagcaatttttcgaagtgaaaaccattggcctgacaagcacggtcctaatatgtaaagagagttggttaacaacactcacgtagtaattcatcaacttctctttacacagatcagcaatggttatcatataaaccctgagcttagtgattcataaaggtacttatgtatgggagaagctaaacctccaatctttattttctactaattaattgcctttttgtatagttgtgtaggacttgattagctgacatttgagaggagagttgtggagtcttcgagtggacagagaatttcgaactagttaccaaagacatctttaaagcaatcggctatcctttgctttatctgccttttactcacattcttggccggctcatggaattggaaatagcacaaaatgtgatttgtaatctattaaaactgcaaactaaaaatgtgaattaaaaaaaaaataagaaccgacttttgaccaatttgtatttcaatatttgaagaaaacgagttgagtttggaacatggaagatgtacacagcgatgtttactttatggcacacacgaaccattgacttatcctgttttagacaattgcattgtacttcataacactttgcccgtcatgaaaaagaagaaaaaaatacatgcgcattcaaaaatcaacaaagatgagaccaactcaccaaagacaaccacgcacgttcgtttgttcaacacacacaaacaaacacatcacacactctctctttctaaacattggtattatatgttaagtagatgaatttcgagagagagtgcgaggcttaagggagtttagtagaagtggccataagtagagctaatctgaggtttctgcaagccaaatttgttcttacttgttgtctttagcatccgtcataacagttttctctgtctcttcttcctttacttcttcctcgtcgtagaatttttcatcttcatcatcgtcactacccatgtcatgatcgaagtattcttcatagaactggtcgtctgtgtcatcatcctgaccgttctccagcctctctgccgacttttgtctcattaacctttcttggatactgtctacgattgcagttccctgttaacattttacgcatttgtcaagtttaatcaaggttatacagaacatagtcatgaatattagtagatttttgaagcactgtatgtgtcttcaagattgaacttaccatcttatggcaaccttcttcaaatatttcaagaaatccagcgacccatcgatctgcattctctacccactcgttgcgcagcatttttacagtttggatctggaaaaaccgggtttaacaacaacagaggaaggagcattataagaaacttctacaaaatcagctttttcagaatcacatatgaacttagtctcatcagatatcatattactagctaaagcatgaaactgcatggaggtttcaagcgcagcggatacacgagataaggctgctactaccgagatgagattatataacatgatatcgcctggcactactacagcggattaacaagcatcactttgtgatgcaattctataacccaataatcacaacaagaagacacaaaataaaagcaatacatacaaatgttttctgcctagaggctactaaccaaacagagtattaaagtcctaaaagaagtgaacgaggttcaaattaaggacaagttagactccaaaacgtgacacattaagagtggtttccaaacagtcgctaaatagtcaaaggtacaagatcaagcggagatgtgaatgaataggcagagacaagacctaaaatttagttatttctccttgtaacttatgatgaacagctttatttgattgaatgcaatacagtccaaatgatggacttgtgatgaactaatgatcaattaagcaaaatgaagttgagagaagacatgccttttctcccactctttcttgttgttctttgaccctctcctggagtttctttagcctcatattaactctaagtctcttttcctgttgcaaatcgacaaatccaaagttgattcttacaagtgaattttttttgagaaaggacaaaattgtagagataagaaaatgatgacatgccttgacaaagctaactccaagatcttcccttgagtatcctctatccaagttacgcatgacatactgattgtaatctttcactattctcattattatatccgaggtcgatattccttcagttcgctgtgtttccttaaacctcccaactttcttaacctgcaacagatgctcagttacaacagaactatgaaagtgtcaaaagcaggagtatgaaaattcttccgactcacaaattcatagacatcctttccagctccgcttgaatcagcatagctgtgcatgagaattatacaaagaaggttattgtagttctaaaatcatttgtaagaaaagagctaaactaacaacaagcacgtcgtgaaaggtaaaaactacaaaactaagttttcaccattttttaaaactaaataaaaactaacacaagagacacatgttcttacggaagagaatcgtgggcaacatagtcaatctggtgcttgtcaagaaactcctggttgaccacccatggtgcatcagggatgacttcatccacccacctgcatgataaaaaaaacgtgttctaaaattccactcactgccacttccatgggtttttctactaacacattcaacagaacataagagaaaacaattacttgcaatgtcgaagtgattcatatcgctcttctgcagtcattacagtccttcccttgtacttatgggtagtctcatcattgcaacatccaacaagaaggtaagtgttgtttggaaacctgctcggccgattaagaaacggcacaatcatagcaacaccataagaacacgaaaccagaagtcaatttctctcatacctcctcaaaataataaaaaatcgaaaacattcgtcaagaacatatatccagaaacagtatcagctattgcaaatttcaacatttagaaagggattcactaaaatcatacgcgacaagaccttgcacatcacagatttcaatcaatacagaccaatcaatcaccgagactatctaataaggaagatatgtctctcgacctaaacaaaaactgtacaacttacaatgaaccagactcaacagatcagagaaaaatgacactggaacggcgaaaattgagcacgcgacggtaaaaaaaagtcgaattagagatgaaaatcaggacaatcatctctaagagataagaaatactaacgctaatttggcttgttcgagagatcgagcatgaccaaagtggaaaagatcgtagatcccatcggcgtagacgcggacaggacgatcagtgggaggagaactctggacagccgtagagccagaggccgcagcggcggtggaaaggccgtcttcagtgcgatcgccgataacgttgctcataatttccgatgaaggagccgaaatcacccgccttatacagaaaataaacggaaaactacaaaaggtgctagtcgcttccctcttctcctactctttttttttttaattttgtgacgaagaatatcctctagaggaaactgattattctaattttatttatttttgtgttcaggcatttgtaattttattttctcactgaataaaatggagagaaataaatagtatgtagataattttaaaaatgaagaaaaagtaatgaattctaaattttattaatctgatatctttgtcataaggctggagaaataggaaattcgagagtttttttgtaacagttggtgtttttgttgtaaagttgaaaaaatggtttagttttcttaaaaaatctgtattgacttgttggatacttaggaaatattttaagtcttaaaagctgttctttggtttatataattaaatgaatgttttggaatttttttaatgaaaagctatagtataatgttttgaattagttgtttgaatttaattggtgagttatatacaacagagtgaataactgaatattgctaagtgagccagtgaccaagtccaaggttgtctctcagtggccctcaaggttaacgaaggttgtccatgacttttgaatggtaactacaagtctaaaagaagattagagaatgtgaatacattaatcatatatttatattatgattccggtataaatacaagcaaatccaatcagagtaagagtttacctcaaagccagttccacactttagacctttcctatttctgtacatacaaaacattccactattttaaagatatgaaagtagcaactcttgagcttgttctgttctgttaattggataagcggtgatcactaggatggctcgaatcagatccctgaaactgtgaggaccccattgtctgcacaaacaaaaaccggaaaacatacaacggttataaatagggctgatcacattttctactgtaaacagaggaatttcgcagtctcgcttcaatcaaactgataaaaacccgagaaggaagaagttgacattgtcaaaagaaaacattttgaggaattgggttcgttttctctttctttcttttgtaacattagagcgtttttactaacgtcacaagattacataccatgtcgtgcagagtttcttcgatgtcatagcagccacggatagcgcttcccctaaaccccgtctgtccctgaaactagacaatccacaaaatgaaatagatccttctttcttagaacaacttgactcgggaggaggagaacaataagatatatatatctcccgaaaaatacttaaatagcatagaacatcaactcacagctccttgcatgcttggttgtgtctcgtattgactcattcgttcatgaatagaatgcaagtttccctaaatcatccagtatatgaaatatcagtctcgagctttatcttaactaccaaaaacttcatcagactatgtcaagcgattggatattggttacggatatggatttgcatgtgttataacaaaagctttgaaactaaaaatgagatagataaagcatttcaccatagcttgtatggttggcggatgtccatagtaaccattctggatggaagaaatcgatgggaactgccagaataacaagaacagtgtatcaatttcaatgaaacagtaatataaaaattgttagacaacaaaatgacagagtaataatgtgcacccactccttgattagtttgttgtgttgaataatagaccccaagagttgttgcacgggagcctagttcgggctcttccatatttgcttgaggaatgtaacaattctcaaacgtaggagctctggagctaacttgttcctgcacatgaaaaataagcctaatagtatcagggtgcatggactaatttcaagtatttggatgaaaataatttgccatgaataataacactgctaagaaaatgggagatttcagatataatagcatggcaaaatcagattactaacggtttcttggcgaagttcttctgacctgtttgttgcatcctctggcccacagtatacctttaaacacaagataatcaatcagatctttccgccagggctagcaaactacaaataatctcataagattgaagaatctaaaaatcacctttcttttcttctgaattttctttttcttggacacttttgatgcacagtccaacacaccttcgttttctaagccaatagatccacctgtcattaacttgtctggctctgaaggaaacttggaagaattatccatactaacacaatgcttcacggtttcctccaataactttaaagcagttttgcaggcttcatctgataaagatgcaactactcccagcttgacaaagcgcctacatagatcatcaaaacgtgccattcggttatctatagtggcacatttatcgtttttgtcttctttgttgttacctttctttgaccagcgcttcaatatatactgagacggaacgcgggaaacatcagcgctttgaagtacaagtatcgcatgtttgcataggaatccctggtactcaaataaatgacaagagcaacacgcatccaacaactcgttgttcaaagcaacgaagaaattttgtcgttcctcgaaatcttcaatgcggaatattgctgttgtcccatcttctctttctttttgaagttgacaagaaacaactccgggtacctcagcttggaacttcttaaaagcagcgtccgtgtagatcaaggaaagctgtttctcgaaagccaaagaagacctcagtgtaggctgtttgctctgatattcaagatcatccttagcttccacatcacatcgatattgcagaaacttcatgtagagctcaaagaagtccttgaatgtagcctccgagttcatatacttgtcgaaatgagaggcgatactgccagatctttcaggtccagacagtccagctaaacaaattccatgaaaataatgtggaacccattttttacgatctctaaacaacaactgaacccactcattctcgttaagttcaaatttaccaatcatatttgaccacctcctttcaaaatgttcatctgtccaagagcttgctacgcaatttccgaaactttccataaaaccatcatcttgactcacaaatggattcagcatctcagaaattttgctcagcacactccacaaacagaaaatatgacgaacatctggaaagacttcaacaacaatatcacttagaagcttatcctgatctgttatcatcactccaggagcttgaccaccgactgctttaagccacgttctaaatagccaagaatatgttgactcactcacttctccaatcaaagcacatccaagcagaacgtattgacggtgatggctgaccccaataaaaggagcaaatgggattctgtatccgttcctaacataaaatgtgtcgaacagaacaacatcagaaaagctgcaatagtcatgcttagccttcgcatcaagccaaaacacatttctaacacgtttgtcactatcgaaatctaccgcatagaaaaaaccaggctgcttatcctgcatctccataaaatgctcaagcaatagctttaagtcttcctcttctaaagccaattgaagacctttctttattgctagcgcaccagcaggcttgttctttcctcgtacgctaacataaaaatcatcaggacatatctcatggttatgttcttttacaaaattatatataacccatttctcatcttccttcctcttcatatgcaaaccggctttgcaaccggtctttggacatgaacgtggattgatagctgtggctttctcgcgcttggttccaaatctcgaacacgctattttgacatcaataaacttccctgatcttttagaacgacggctagcttttattgtgataccaaatcccactgatcgagcatattctctgtagaaatagtatgcagcttcctttgactcaaaatccatcccatttctgagctcactaaccgttgcacactgagcaacgttcccacttgtacttgcttcacaaaatacatccacattactactttttgttagaagatctatttctacatcttcatcatccataacactagttccaactctgttaaccgattaaccggttagacaaatttccacaaatcaaccattttaaggtttgctaatttcagaatcccagcaattgaatactacgaaattagtgcatcacatgatcatggataatctgagaaagcacaacaaaaacgcttcaaggtggtatcaggattcaattcaactacctagttaaatctcgaagaaatcagaaacccagagattcaaaggttcaaaatcaaacctctcgagttcaaaatttctccgtgtctttgtcttcagttccctaatcgagctcttctgtcacagacgtgcaatagagagtagcatctggcttcgcgaggactaaaagaacctcagatttaaaatttctccgtcgtctttttctctgcttgcagcgaaagagggaggttttcaaaatgagcacgggagagaatttaggaactttttataatagcaagtcgacccttatatttttgtattcatttggaaaaagatctatgtttgagaaaatttgaaaaacgcccactttgaaaaatagttgaggttgagttggcttaatcttaaatctttttattttttttgacaaagattgaaccggttctttttattctctttttcttctacatattattcaacagaagtattattcaaaaagatattttaataagaatttcatatagtacgacgtagtttagttaatttgaattatgttttgggacttctaatataaaaattttgtttgaatttctctcttgtgactttcttagtttttcttcttaataacaaaaaaagtacgatgaaaagtccggaagagcattggctgcgtttctttgaactttgacccaatgtggacgtttcaatagccgccaatttggctaacttgaccacttttgaattttaaatacttccttaagctcatatataaacaaagtcatacatttaacatgtaaaccataattattattgttcatgtaactttgtaaaacccatttatagccaccgaacataaaagtcgaaccaaacattttgtgatattgactgtgtagataactaaacttgtcattttgtagtcttattgaaaaagttgtagtgacgatttcaggacggtgacgatacattttcaattgcacaacttggaaatgaaacaaatctttaaatagaaaaaataatcaacgtgatgtggattttgataccataacaaatgaaataaataaagtgaaagcgtctctattcatattaggggaaattaaataggaaataaaagctgaggggtcaaatctaaaagaaggaaataatattagatttcatggtgaggacggtttggtcggtcggtggctccattggtggtgtgggccttcttactcgcttttttcgaccagccagccgttcagccaccgcctctctttttgttcttcttctgttcttcccaaatgactaatctgcccttttattcattctacatacttttttggtcaactccttacaaaaaattatgaatcattaaatataacatatgtatctaatgcaattcaatgtcatttttgtattagatgttttcactttttttttaattgagtaaaatatgctatttttactgaggtaatgcataattattatttttagtaagaaatcatgttaatccatgattatttcttgttaatccatgatttcaattacatgttaggcataaatcactatttagatgtgttattgatcactttcttctttaaaagtaactttaggtatacattataacatgcaaactaaatatgttttatggtttacatatgacatattaagttttatcacaaatgtgaaacacacctttcaaaaaactaattattctaaattttctaaatataaagattttttttattttttattttataacctcattagattaattgtatataagaaatagtatagaagaaaactaaaaactttttaaaaatatgatgtgtacagtaatttaacaaacattggatcttctcacttctctcttttactatatataaagatagttcttatcattgtctttttttacagcactattgttatcattgtttagtgtcaaatgtcaatatacacaccacacatattacctctagttcttttattttttaaaataaaacaattacatttgtaacattttgataattaatggaagctaatgatcaatttgtgccacatcacatttaggggtactaaaaattataatgagagaaaacaaagggcaaaacgggaaataaaaacaaaatgcgacggtcttctcgtccgccagatttggctttcaaaaatacgaaacgaccccacactcactctccactttataaaccctaaaagattctccttctctctctcacacacacccaatttgcatttctttcgtcatcatcatctactctttctgcgtttttcccagctgaataatctaaacaaggaaaagtaaaacagagtaccaatctcagattcatcagctccacttggtaagcactttcaaattcatggtctgtttctatcatttgatcttcttaactcttttttcgggatttctaaccgaccacaaattgattcagatcctttaagttcattttcagaaaaatgggttattagaaagttttgttgggtgccgcttcgtcttcttcttagttactgaattctctaatttgtatgattttgaaatattcatcgatccaagtttcacgtctctctgcgtttagatctctagagatcgaacttgtttgtgatagctgcagattcatcagatgaatcaaatcattttgaagtagtgttgactctgtagtgattaatcttaggatctcttgtgttgtgaacggatttagaagggtttttttctatggtgattaaggtgaagaaatttttgaactgtgtgattactaatctgaacttcttacaaacatttagtggtaggttttggaaaaaaaagtattatactactaatcatcgtcttgttctgattactagattatagtattaattaaatatttaaaacatggtaattaggaacatgatttgggtgttaagcttgcaacttttgaacaaacaaataaaaaaaggttgcttgcaagttgcacagccttaccaatatatatgtctttatctatataggcaacgattagacttagaccaaataagttgacaaatcaagataaacttcttagattagagaaattcctcttttgatcgaatattcttgggttttatacagaaaaagaaatttggttggatattgaatcaagcgttaatgatgtttgtgatccatcatcagcaaccatttcttgtatcgttactctttagtctttaccttaagatttaactttaatgcgttttcgtttgttcttttagttttttttaaccagatgttttataaatagaataatattctggtctttgttttcttgttacaaaaccacgggctcatgagtcatccgctgcatctggtcggcgtaccttatgattcttttcattctctattatatagtcgtctaattatatgtataatagaaatgattgctattagtttaatataatttgctttctagtacttatttgttttggcacaatgaaattgaaaaccactttactttattttcttatacaaaaagaaagaaactttgatgatgatggttttggtgggcactttacacattacttatctttagtttgtttggtaggaatttatttatataataagtgtgcttttattcatttgtattctggtagagattgttggctattgaaacagattcttactctggtaacatcacatgcctgcacccataatacctattgatctttgtcttctcctgattgtttttggattctttagctttctgatctaaacatatgtcattttctaaacttaaaaaaaaaaaaaaaaactgaaacgaaaattagaaatctttattgaattggtatttcaaatagttgtgtaatgagagatgatgtatacctgttgactgttcacattaaatatcttatcttgtttgttttgtatctcttacttgcaagctactgttttcttttttgatgtaaagaaggaactttaaatctgatatattagtagaagtatatcatcttcgaatttcttctcatgcgatatcttatatttcttttctcttctgcagaatttaaagtagccataactgttcgatcataggatggaagaagcaactcaagtaacgagttctgaggtccctgtagtgaaaggtgatgttgatgaccttaagacagctgatatttccgtcaaggtaatgatcattagtgttcggtttcgtagaattatctgtttcctcttgactataaggaatcctttctgtaaattgatgcgaatcttgcaaagattttatttgttttatcgaattgaatctcctgtctgtctatcaagcttcttagtagcagcgccaaagatgtaagtattgtcttgatctattgcaggctgtgaatggagaagtgccaaaggaggagaaagaagaggaagatggggaattcataaaagttgagaaggaagcttttgatgccaaggatgatgcggagaaagcagatcatgttcctgttgaagagcaaaaggaagttattgaaagaagctcgagtggttcacagagagaactacatgaatcacaagaaaaggcaaaagaactagagctcgaattggaaagagttgcaggggaactaaaacggtatgaatctgaaaatacccatttgaaggatgagcttttgtctgcgaaagagaagttagaagaaacggaaaagaagcatggagatcttgaagttgtccaaaagaagcagcaagagaaaattgttgaaggggaagagagacacagctcacagttaaagtccttggaagatgctttgcagtcacatgatgcgaaagataaggaactaactgaagttaaggaagcttttgatgcgttgggcatagaactcgagagctcacgaaagaagttgatagagttggaggaggggctaaaacgttcagctgaagaggctcagaaatttgaagagctgcataagcaaagtgcttctcatgctgactctgagtcgcagaaggctttggaattttcggagctgcttaaatcgacaaaagagagtgccaaggaaatggaggaaaaaatggcgtccctgcaacaagaaatcaaggagctcaatgagaagatgtctgaaaacgaaaaggttgaagctgccttaaagagtagtgcgggagaattagctgcagtgcaagaggaattggcactttcaaaatctcgtttgttagagacggaacaaaaagtgtcttccacagaagccctcattgatgaactgactcaggaacttgagcagaagaaagcttccgaatctcggttcaaggaagagttatccgttctccaagatttggatgctcagaccaaaggtcttcaggctaaactttctgaacaggaaggtattaattcaaagcttgcggaagaactcaaggagaaggaacttctggaatccttatcaaaagaccaagaagagaagctgagaactgcaaatgagaagttggctgaagttttgaaagaaaaagaagcgcttgaagcaaatgtagcagaggtcacaagtaatgtagcaacagtaacagaggtctgcaatgaactagaagagaaactgaagacctcagatgagaatttctccaaaacagatgctcttctttctcaagctt

SEQ ID NO: 320 - DNA, 78732 bp, Arabidopsis thaliana
aagcttctaggtagtgctctgtttggtgtaggagagtatagagctgctgtgaaggctttagaggaagctatatatttgaaaccggattatgctgatgcgcattgtgatttggcttcgtcgcttcatgcaatgggggaggatgagagggctattgaggttttccagagagctatagatttgaaacctggtcatgttgatgctctttataacctcggtgggctttacatggatttgggtaggtttcaaagagcttcagagatgtacactagagttttagcggtgtggcctaaccattggcgtgcacaactcaacaaggctgtgtccttgttgggtgctggagagaccgaagaagctaaaagggctttaaaggaggccctgaaaatgactaaccgagttgagttgcacgatgcggtatctcatctgaaacagttgcagaagaagaaaaaggtcaaaaaaggaaatagtgctaacgaagaaggtccgtttattgttgtggaatcttccaaattcaagacggtaggcgagaagactactttaaggccagatttagccatagctcttcaagttagagccttccagagagtcacaaggctgtggaaatgcgatgttgaagcattaagaagagagatgagagacaacaatgttcctgtatcctattccggcaatggaattcccacaaaatctataaggagaccaaacttagaagagattctccggcgtctgcttaatgtcctgaaacctgaaactttccaaggagctattaaggccataaacgagaaaatcctctcggttcttgatgattcagggtcgggaagagtcgatttgggaatgttttacgcagtgattgctcctttatgcggtggccatccagacaaaaggaaaagagttgcatttgatgcgctactttggaaaccggtaaacgaaggaagctctcagattacaaaaatggaagccgtcaaatacatcaaactcttgagagctatctacataccatcacaaggaatgagtgaaatgttagaagttcatggagaaagcgatgatacttcgacggtaacattcaaccagtttctagagatgtacgatgattcagagtggggatttggtatcatgtcgactgtttttaaactcgaaacaagagataggaatcgacacgggaaccaggtttgttcagtttgccgatatccgattatcgggtctcggtttaaggaagtgaaaacagggtttagcctctgtaaccaatgttacagcgaagggaagattcctccaacgtttaaacagcaggaggaatataaattcagagagtatgcgagtgaagtggaagccatgaaagctaagtgtgtttgtttttcaatgcaatctcataaaaaaacaatagccacttgaaaaatatccataagtttttttttttggtggtataattcaatttccacagttcttgtttcttaaatcttaatctgtagtctttttttcttaagttgtgtgtatagttttgatgtagtgtgtgttggtgagcaagtatgattgatgatttcttgttgtattttttttattttccactcaatttcagattaatatgattttgtcgatggtcgtgaatggaataaactgtattcagtttctagaatgtaatttctgacattttcaggcttggccagtttctgactttcttgtcagattcagaatttcatagcatctgtagtcatttgcatattgatgctaaatttggaatgagtgctttttcagctttttatcttttagtactacttttttctcgcattgtgctatttgattcagtattattatatgaaatgacattttagagaaggaattattactatattttgaggaacttaagaagaaagaaaactgtagagtgagtgacatcaatatatccagataaagtaaagtgaaaatgtagaaataaagagacttctgatccaagaactgcagtgtgatgtcagaactcagataaggtgcaagtacaaagattaaggaacctcataagaaaaaatatgttatggacctacttgcatacataattattatcttttctttctttgggagccgcaatttaaggaaattatttcttggaatagtgtgaaataatatgcaaatgacataagccaatggcaatggatgcaactagttggttcactgcccaatcacattctcctcccccattttctactctcgagctcttacttgtttcttacgtttgttatagtaattctcctaaataaaagtcaagtacacatccaagagattgtggcctagtcgtgaatctaaactactccattgttaaagatctgacatttaaaatcaaatagagattttcctagtaaaacaaaggatgtcgactatcacttcactaaatcttaactgattgtgagatgatgaactttaaaattctgtgtaagaggatctgataaatctaaacaacaatcaaatgcaaaattaggttttgtcccaaaatgaataaataaaagaaactatcagtttgtataatgcaattcttttacttgtaaacatctcttgtacagccataagatccatatgtaccatgactttaacccaaaagaaaattatatgctcattcctcatctctttcaatttctcttttgttccttgaaaacatgttaacatacagttcatagcacatcccaagttgaaaacactttgaagaagattttacacattaaacacaagttaagctcacaattagctttctctttttttcaaatcaaagaaatatgatttttgctcatgggcaggttccaaactaacagatgctaggcatgttgctccaatagcatgaccccaacgaggccataggatctacactggacgaaggcggcaccgtgggtggttccaccctgccgttaccttgatggtttcccataagaattccacttggtggggcaagatatgaggcctcgttttgcatttctgtcacccgataccaatcaggcaaaggtgttgtggttgaagggaagttgttgagaaggctcgtcaataattcatcatcatcatccaccgttacttttaccattgttggctcattgtacttgttgtgaatattagggtttgctcctgttgcattgaacccaagttatgtactattaaacactatttaaaatgaaagagtcaattagccctaagatccagtagatatcttcgatactaccaaagatccatactacttttgagtaaattaattaaaatcatcggttataacaaaaagaattttataaatgaaaatgatgggaaattttatgtgcttacccaatgatgaatgattagaagagtttagatgatctattaaaagattctcaaagtccatcttcacccttttatcttgaacctcacataggtcactggaggaaaccctaacgtccttgaagagtccgcctcgagacaaggcttgagactcctccaagagggcatcaagtagtccactattgccagaaggtggctcaagatggacaccattgtcaataataggactagaactgaacgaatgggtcggtctttggtttgaaggaagctctaggacgctattgtctagtcctaaagggaaagaactcgatcttatctcaagatctcccataagcaatgaactataactcatagcatcaatgtctttcttattggtatttcttgtgtccgaattctcggagatgtactcaaggatgtggttgggattacacacctcgttagacgaggatgatgaggacaaaggaacagagaaaccaaactggttattgtcattctcaaggctattgttgtaaagagagaacatttgaaaatccatcgaagaatcggggatcgggtttaggccgggattagtagagactaaaggatcaggacgcagcctttttgatggttgagaagatgaagaagagaatgaagacgaggatgatgaagtattagaagaattagtgtactgaatcatattttggtggttatgatcaagatcttggttttggaactgaaaggaagttaaatcaaactcaaactcatcatcaatatcaatcccttgatgttgaatctcatgagggtataaaggcaaaccagctctttgtcttctcttcatcctcgtgttccaatagttcttgatctcattgtctgttcttccaggtaactatatacatcaaaaacaaaaaaaaaaacatgcttataagcatcaaacaaaaaaatagagaagcaagattaatcatgccaagagaaagaaagattcaaagttcaaacacatttaatcatgcaaattgtgtgtttaactaggaaaaaaaaattgcatataagaaaatttaaagccctctagtttcttgaattgaagaaacaaataaggtgattaatttaaaaaacaaaaattaataaatgaagaaataagaaaaaaaagatttatgataaaaatttataacctgagaagccatacgagcccatttgtttccaagcttagcgtgaaggtcgatgatgatcttttcttcatcaggagtaaaagatcctttctttagatttggccggagatgattcgcccaccgtagacggcaacttttgccacaccggagcaaacctgagttcttttgcacggcgttccaattaccttcaccgtgttttctcacgtactccgtcaagatcgcatcctccgtcgttgtccacggccctttcttcaaccctctcccctccatcgtagccgtcgccgtcgtctctccaccaccatccatccttttcaacacggcgaccctccgatcaaggagaggaagaaaaaagatttttctctctgttacttgatatatacgatgtttgtatattgtatatatttttgtatatatgagtatttttgtgtgttgtgattttagatatatagagaaaaagaagaaaagggtgaatttttttttagaggtgtttggtgtatatttggaagaaatataaattttgtgttaaattattacgtaataatttgttgttattacgtgctttatttaaactattaatgccttgttttgtcttcttctcgtctctttggtctttccttagagaaaagacagagtggtcttaagaaattacagaaagacttagataattgtctgtctttagacctatatatattagagttgataaaaattgtgatgagatcattatgagaaattatatctcttacttttatcacctcttattgtgttttttttgtttgatcaaagacctcttcttgtctcagtcttatatttgtttgaatcttcttttgttttctgacatagataagtttatgtttacaagtcgttctcaataaaatccatagtaattagtcaaagccgttttatttgatgttaacagagaatccaattgaaaatgacttgttccacctacttataaacttttatgaaacaatagacaaacactcgaattataactaagctaagaatatcaaaaactaagaaatggaagtaacatctcaaattgatcagtttatatatctcttgaatcttgacaatatatgattagagatttaaaattgtaaattaaagaagaagaaaagaaaaaggagaggagtgagcttctttcacggccgcgcatagcatgcctaatggaatggggacgttctcttcaaagacgcgtttttctcttatttacttgtcttactccttttctttttcccacacgccttttatgtctttcttcttgctctttttaaaaaaaaacatttattttaaatctagaaaatatataatgtaatgattttctttattctatattcaagggtagagggaaagaaagataaatcagaagtcattgtatgcgatatttcatgcaaaattacgttggcatgatcacttttcatatgggcaacatttttatcataagagtttgagtcttataagcaattacttctttttaagagcaaaattgttccaaagtgtcaaattgtattagaacactcctcttaaaagattccctaacttttttcattacagttctactaattgaaaatgttaattgttgacaaaaataaggcaaattaatgaatttgtcgtatatacataatatgtattcacgagttcaacgcgtcttgcaatttttttacttttcaaaacaaagaattaaatgacgttgaatacgcttaaatttttctttatttgaaaaattgaatgataaccacatgtatttggtgtaaatatttttagtttaaatttttaactaaaataattgcctagttacatagaaaaattcgcctataaaatttctctattccttattagaaatatgtatttcaatataaaatatgttttcaaatatattaattttcatttcaggatgtgtaaaattataccacattagtagaacactagaacctataaacttaaattaaactttcttagtctttcctacatcagttgaattatatcactaattgatatttgcaatttgtttattcttgattatgatagagagattgatctaagtcccaccaaatttgttacatacatttaagttgtagctcaaaacctcgtacgttaattatatgtaattcaattatgaagagtgtcaatagaattgatcaaaagttgttaactctgataaaaactatcgggccatataataattagttttcaactttgacctattagtgattttcagtttttttttttttaattaaaataatatggtttgccctttaatatattattgttgaacattttcaatgaattgttgtaacttgtcatacaattccctcgattttgcccatccattggattctttcacattaacgcaccttaccttgaagtgctttccatatatatccaggttcatttgaccatattactatattaatttcttactttaatatagtaatatagaaatacttttaaaagtacaatatatcatttttcattacattttccttatttcaaaattaaaaagctatagttttcgtacttgtgtagaagacgttcttgctgatttcagaagtttatgtggttaattagatccttttgtaagaaaaagtcgttgtcacactatttttaccgaatctagctcgattaagtgtgactgtgagtcggacctaatatattagagatttgaagagattaataacattttgggcctctaattacaaaaggatttgaaaactatcatatattttatttcatgggctttattattcttaaaatccgaaatcttaaacttatgtttttaacttcagcccattgtgttgaccttatctttatggtacctatatatattaggagatagaatattccattcaatatttcgtctcgatatgtttgttacaagtttagataagactttgttagactttgttaatatctcatgtacctagaatctaggaaagatcgttgctaaaccgtgtatatattgagtgcaatgcaaagctatctcctcaaggagaatttcactatcttacaatatatactttagcttaatcctaggtttaggagctattgatgagattcaagatctagatagcggagaagctttatggttattggtgattaattgagtgatctacacaactgttcaactgaagtcgaatctttagagtttagactgttcaagagttttcctatataaagaaaattgtttgaaagaagcttttcttctagttagatcttccgttgtgaaaaaatcaaaatcttctcccccacgtaacctagatcactccggaaactccacaaaaaccatctcttttgatctcaccttcgagatactatcgatccttccgaccaaatccatatccgattccaatccgtatcaaagctctggttctcaatcatccgcagtaaagaattcgttgactcgttcctgactaggtcaaagacacggccgcgtctccttttcactttcaaacacttggattccgacaagcttttcatctactcagctcctgatcacgacaacggaaaatcctctccgggcatagccagacacgacatgacgatctcgaatttcgtcaactacatcagatctccccctgtcaacggattcgtttgttgcacacgtggttcatcgatcgcggtttgtaatccaaccacgagacaaatagtaaaactgcccgatgttgttaccaacgaaaattacatgcacgtacgtctcggatacgatccagtggaagatcaatacaaagtgttgttggttgtgatgatgttcgacggctatagaacagatacagatcaggaatatttcgttttcacgctaagttctcaacaaaaagagtggagaaagattgaaaacaccactggagaaacttatcacatggtctatggagggatatgcatagatggtgctatatactatggggtttcacagtcaataatagttaaattcgatgttaggtctgagaagatggaattcattcaagcacacgaagtatcacatatcgcgccaccatactattccactcttttatatttgtctagcgatatgatccgtatggagaatcattccaatgaagaggtaagattttggattctagaggatgctgagaaactcagagtttcgcatatggcgtgtgatgtgtgggatgattcacttgggaagtacgtaagggccaaggaagagattcataccggcaagcttatggggatttatccacggttacaatcgtcaaaatataaaccgtttagtgtttgcgtttaccattttaacaaagtggggttaaaaaaaacagagatccaaggaagtaacgacgatgatattagatttcgttgtgggattggtatgcgaactcatgagatattgattttggaggttacattgagaatattaggttcttgtgaggagttttcatggtttcattagctttttcccttctgttcatgccttgttttgctgataaacaacaatttcgacgattttcttgacaaacacatcttttataagggataacaagagtagaactattacatgaatatgtatgtaccataaattcatcaccatctttgtgttggatagccaaatttgttctaaactctcaacctcttcacactaaagtttctctcttcctcctcaaagagataactacaacatttctttgatgaaatcaaggctaagtgtgtccttaacgatgagaaacaatccaaggaatatcacaagcatgatccctgaagacattatcccttgttctacctctacaggaagcttcttccctcctctaacagcttccaacaatatcaatgccaatgttccaccgtcaagagccggtaacggcaagagattgatcaccgcaaggttgatattcagcaacgctgcgaattggtaaagcccgtcgatatttgatcttgccacttctgctcccactgcaataattgccacaggacctgctactttacttgctgtctgagagaagttaaagaatgtttgttttaaaccgtccaaaacattagaagatagccccataaactcccttcccacaaatctaaacgtttccggaatgttcctcggtctcaccttagtgattctaacatttggagacaactgaacaccgatcttccccgtcccatcaaagttcttatccggtgtaacccgaatatcgaaatcttcaccccctctttcgattctaaacaccacattactcttcgggtttcttttaacaatgtcaacaatcttcgaaacagcgtcaggcccggttttagacagctcagtaccgtccacagcgagaattacatcaccagaaagcaacccatcacgagaagcagcagaaaaggtcttaacttcaggaacaagaacaccaggaaacgcttcttgtacaggtaaaccaacagataacacttgaacaaagattatagcataagcaaagatcacattggcgataattccagctgaaacaacaattgatctatctagagttggtctgttcttaagaagattctcatcgtcaataggaatctcactatctggatcattatcagggaaaccaacaaacccacctaaaggaaaagccctaagcgaatactcaacattgttgtaatcgaacttagctagaatcggaccaaacccaattgcgaatttactcacatggatcccttggagagaagccgcaaggaaatgacctgattcatggacgacgatgatcgttgtgagaacagcaatagcttcaagaacagattcaaagcttcccaaatcaatcccggagatagctcttgatctaaaatcaaacctttctccatctgggtacctcttgtttccgaacaagactctgtttttgagactttggttggataaaggagtgaacttggggaaaaaatgagattttgagagatgggttttggatcgtcgagggaaataagagatggggttgttgaaattggagaggaagtgagggtttcgatgagagattggagaagaagaaatgtttaatagcattgtttcgtgagaagtggagattttggagtactacggtgaagtggtacgattggagccattgatgatagagaggaagataataatgagtaaacagagtcgtgatttggctttttttgggtgtatgtggatgtgattcaattcaacacaacactaatctctttgcgagtatttttgaattattgtctatgggccttgttacatacaataatgtcagcatcgattttgttattgaactttagggcccaaatatatttttttgggtcaaacgagtagatttttttttgttttgtgttggtttaccagtagtgttgttatacggagatgtaagagtagaacaagtgtttggaaatttgaaatagaggatacgtagacactgaaatcgagtgataagtgatctagattgaattcttggatctgcttattttgtgcaatgaagaagatttacagggtttctctaattcggtttataaaaggatctttatatcaaaacgtttagaaattatgaatactcaatatgaattattttcaactcaaaatcaattgacgataaatagaaagaagtttatgtttaaaaaattctgtgacataaaaagattttaagaaaaaaacatgtttaactttttttaagaaaataataaaaatatatttctcaaaagttacaatatgaaatagatgcaatctttttaaagattagtagtgaaaataaacctacatactttctagagaggatactttattaaatttagtaaattataaaaacggagccaccgttggaattccaatattgagaaatataataaaattatttctaaggtaaatcaaaattctaatctacttattttgctgaaattcaaagagatcaacaaaaaagaaaaagagagaatccgaagaagccaattgagttgcaaattgtaaggtttggtgggcacgtgataaactgggtttgaacagacactgtaatctacttttttacacgaagctttgtcggcttaagtgttacttttactgttatatttgatttcatttgacatatatattttttttattttttgattttttttgtcgtcgtcatagacgctaatgcataacatatttcttgttgaatttcaaacttttaatcgagaaatccaacgataaatttaatttttatttaaatcaaatcttaacacagaatttttttagaaaatctagatactactactactgctaactttttgttttaaaaaaacaaaaatcattaagtcttatttgtgttacagattgacattataaagtccaatggatcgaattaagtaagaaaagaattatacacaacttagataactagtaacatcaatctagctaaaacaactggaaacatcaatctttggaaaagatagaaaagagaagcatgcactaactaaaagacctaacacaagttgggtgtaatgaaataaacaacgtgtccatttcgtatagttatatttgattgaacttgattgtattgtaggtaggtcatctttccacaattcttactatttaaagtgattctttttcttttctactattacttttaataatacggtactaaaaagtatataacctgactaatgtatggaacttcgtatttgagttagtactactacgcatgaaaaaagtagttacgtttttccatatgtattattaacggtagttttaaattattattctgacaaagaaaaaacaatctacaatacaatacgagagaaaatacataatagtagtagtgattagtaaaagtaattgcatgaattttgttttttaaaaataaatgaaagggaaattaaaaatttcgggtctatatataaatttcgacccactctcttgtttaatccctccttaagcgcctttgtgggtgcgcaaaaaggcaaccaggttcaatgaacctggaagttgtatgttcttgttttattatctccatcatcattcttcatcgctcgtaagcatgctcatcagtataacaatatcatataactctgtaattatttattcacacacacctaaccaaacgaataaacaaatcttttgctttcttgaatttgttatttaaaccaaaattgtaatttggtatatttgcaagcgacttacatgttaacgaagctttgaaactgcagacaaaatgggctgatgaagagaggtatcaaacatctatgtttcaatggcttcacgggctactcatcacttcatcatcattatcatggtatgtgagctctctctctctcaaatatttggcataatttttgaatgttaaattttaatatcttaaaaatgtgatcactaaagaggtaaaaacgtttggttgcaatttacagccttcgctacttgcttcaaaaacaacacatgtatggttttaggtaaaataaaaacatggtactaaagaagaatatgcatgtgggtgcgtgagagaaaaactcgttatcttcttgctaatgattttggaatattgatgtattattaattcattattgacctatttgactaattaacccctcttggccggttaaggatcaaagatgttttccaaaagttgtatatatgtatggtttgcaattctaaccaactagaccggttaggggtaagtcagcattctctcctctgatctatgtatatgcgtttctttggtcgactcatctctcccaaaatatacttgatcggagaagagaagaagaatgctaacttatccggaatgggctagctggtgattttagacattatgcatggtatatatataagaaaatgtctaagatctaaaggaaagttgtatgttggtaatattttttttttttaactccatgcaggatcaagctcaaagaacggcgtaaaaccggagtcaaacatctttgcatgactcattacaatatgctctagatgatggattgatatgaatatgcgagaaataaaatcagtatgaaactaactataaatagtattacatttagagattcaagtatgatatataaaatatgagtcgtcgtgttcatggcttgcagcatgaaaaaaggaagagttcccctttcaaaaacttcaatttcttttgtaaagagaaaaaaaacaaaatttatatgtaatcgttgtcttgtactttattttcattctctattttgcaatggacaaattaagattatagttggttgtaatcttattgataagctgggccttattgacgcaatatgggtctgactagatgtcttttttagcaaaagagaaaagtgatgaaaataatattattatgagttcccctatgtaaatcttgataaaatataagcaaaatcagttcaactttaaacgtttgattatcagagattattgttacgtacattaccaccaaaataaatacaaacaaatcctccttaactagctatattccagcaatatattcctctatatatctggatcaaatcttattcattttttatgtgtttttcttttttcaaaattcaaatctgctcttttgataacgttttcttgaacgttaagattaatatctatttacgctcttctctcattctcacttctctgtaactctttcaaataatatcaaatggctaggatcagaaaaagaatccaaaagcaccatatccccaaaaatagagatgttaatgatgggttaaaattcactgggtatccaaaacccacataaaaatttaagcccatacatctactttttctggaaaaaaaacacaggtttaaaatgagctgggtacccaaataaataaaacccatatgggtttacctcattgtgttatgggtacccacgggtttttctaagtcatttttcaagtgaatcaacattttgttgtcaaatttttttcacattttttccccaaaaccgcgatttaacagtttaacgtcaaaaaagacattcaacattttcccgacaaaaaagacattcaacattttctcgccaaaaacgacaatcaacattttcccgccaaaacgcaattcaacattttcgcgccaaaaacgacattcaaaattttcccgccaaaacgcaattcaacattttcccgccaaaacgcaattcaacattttcctgccaaaaacgcgattcaacattttccgccaaaaatgatttcacattttcccgccaaaaacgcaatttaacattttcccgccaaaacgacattcaacattttcccgccaaaaagatttcacatttccggtcaaaaacgcaatttaacatttttccgccgaaaatgatattcaacatttttccgccaaaaacgcaatttaacattttttcgccaaaaaaagcaatttaacattttcccgccaaaaacgcaattcaacctttttcccatcaaatatatatgtaatacagaaaataaatataatttaaaatatatttataagcaaaatatagatataacatacatataatagtatattaacagttaaacataaactctaaaaaaatgataaaaactaagttgggtacccacgaatagtctcggaacaatcaggtttttttgggctttacccactatatcaaaaacccatctgagttttctaaagttaggtttttggtgggcgggtttattttgggttcatgggctgagcttttttacccaccacaacatctctacccgaagaacaccacgtcgacttctttggagaacgtttgatcgtcacagtcactcatactccctcagtgatacgtcgatggatccacagtatccgcttcgtcagccgtcttcgcttatcacaccctctagttgtcggacttggcgttcaatggacaccccgtggttccgatcctccaccggatattctccaactatgtgttggtactcgctgtctcatcattcagttgtctcactgtaagtacgtccccgacgtccttagaagtttcttggaagatcagacaatcacttttgtcggcgtatggaacagccaagacaaggacaagctcgagagattccaccatcagttggatatctggagacttgtccacataaggcactatctccatccgttgctcttgagtagctcgtttgagacgattgtgaaggtgtatttggggcatgaaggagtgacgaaagataaggagttatgtatgagtaattggggtgctcgtagcctctctcatgatcagatagtacaagcgtcacatgatgtctatgtttgctgcaagctcggtgttaaggaacgtctctggaaaatgggagcttaaaatctttcttttgttggcttgtcttgttaggaaacagctattatttgcaaataatcaatgtattttgctttctttaaactcaataactcacgttttcggattcatagagaaaactttgttcataatgcactgcaacccaatgtagagttgaaatgttttacatgacgtcggtaccaacgggatccactgagaaatgaagagcttctgacttttctataaacggctcaaactgcgaccgccacatctgaaatataaatcaatatcacttatatcatatatgaggaaagttgtgtatagcgttaagtgttaaactacaaggttcaagttgatgatagatcttacatctttatactctctgccctcaaagaaaatctccatggcatcaactgcaggaagtgacataagcaagcttgggtgagaggagaacagaggaatggtaaaatatgttaggaatttggagaaagtgattacaggaacggaatcgaactactgctgcatgtgtgaattccttactgctgccgttaaagtttgaacctgagaccatcgaaaagttaaaatggcgattagatcaatttgaggttgactatatatggatgtcagaaacataggcaccttgtgtggactggacaattaatgatggaagagatgaagttagctgagcaaaagaatccattgcatctttagtgttcttctcggaagcgctcttagcaaaagtgatcagaagaacaaactcttcgccatagttgtactcctgccatgggaagtaactcagtctgtttacactagatagtagtatcccacttggtctaaagctatggacgatttgtgaaagaaaaactcagaatatgaaatgagttggttatacctccccctttctaaatattgcaaggatgtcatcttcaacctctgattcatagtccacattagttagcccctgatacatcaacatgaacaaaacatcttaatagagaagaagaagatgatgctgatgacgcaaagacagagctaacaagagaaatggcgtttacatgtaaaggcatacatggcagaatggtgtaacatattcattgagaactttcaagaagaaagggttctcatagaacttgtcaaggtcttccttcttttggaatcgcatgtagagagcgtgcgtgaaatattcattgtttctatcaccgatacaacctgtgcgagtaaaaaacaaacagatagagactggttttataaacacacacagagactttctatctagattgggagcaagaatatgtaagcactcaccaacagatatagcaacaatgcctctcatttggtattgagttgtgtaaagatagtcaagcatatctttttctacttcctcagataaaccctcttttgctttgagtaaacacacatgctccactactttcctaaggaacatcattgatacatagattataaaactttcatcagaaaacataatgtggagtcataaacctatatgcaaagttcgaaactttctcaagaatctcagctttaaacacacacattaacataagctatcacaaaggagctaatttctcaaaaactgaaccttgtcttgttcgacttggaactggctatctgatcatcagcagcgcaaaatgtaaccctaggggtttttgttcgacattgatggacaaacataccgccaccattagacacaaatcctgtcaatttcagaaagaagaatctttaggtcacaaacaatgttacggcattactgaaacagaggccaattttcaaattgatgtgtcgaattgagccgaaatcaacaaacccgccactcgatttagtagagtgagattgagaatcgaaaacccagattgaaaaaccgaaactttacctctggtgagaataggacgagggagagctaaagcttgatggatcattatcgagtgtggcggactaagtctctcgcattgttgcctctttatcacttcccaatatagagagatttaacaagggaataagatttttggggtttgtggtagttaatagttttgtaatacaatcctttttgcgccacaaaattcgttactctatttattatctaatttgatttttgatcttttttttaaaaatgttttgtaattaatttctaaggatagttttaaaatacacatctgaatctgatcatttatttattgtataactcttatacgaaccaggtgatgtacgaaataaaaaatgaacaaaataaataatttgaaactaaagatatattgtgatatcaatctaaattaaaatcgtaccaagccagttatattgatttttaatattttttgaaccctcaaaaacttaatatacaagatcgatcccaaagttagattaggcacgtatacatgagttaatttactcttcaatttccaaagagataaatatacacaggacatataatcgtctttgaagttaagcattcgtgtagtaagtgcccatactatttatggttacaactttatccaaaacacgagtcaaaaccataaaacaaaagattcgttattcaccttctaagtaaaaaagataactctccaaacatgaacttatcttgcaagcaaagtattcttatcttcatctattatttcccattacttaaccttatcttcactaagattgttgttgtagttataatgtttttaacgatcggaagtttctaaaatgaaacttaagacaagttacaacaattatgtgaaatctattgttgtgtttgagaaaatgggtataatacaaaatcaaatatatgactgatcaatatatagaactataatgaagttgaaatacaattctaaatgcatatttgacaacaaaaaatatagatgaaaataaatcattctgaagagaagatccaatagtgattaactaattatgtgaggtgtgtcaactttttacacatttaataagtggaagcaaagacttgatgaatcgtcacattggcctaacgaagctaccaaattacacaaatgaatatattacacggatcatcttttatgattcgaaaggaatctttaggttttgtcaaaaacacaaagtgcccaaccaaaaccaacgacccaattcggccgatttggcacttaaatactttgtttactccacttctcattttccccacaagtttagatttggtaccatgccctattttctaacatattttgatatcatatcacccataactctcaaatatatgccaaatttgatttaacaagttcatttatttgttatatgattgagaaaatttgacatttgggacattagaaaagttatgatttatctatattatttccaagactatcgttagtcaaaacagaaacagtgaaaaacatggaatactaagattcgaatgtaatagttcaactattttctctataacaggccaacaaacgttgaaactccatataattcaagtattcgactcttgtccaagcttaaaaaattgggtttggtttataaatatcgtgattataataatatacatgtgatcaatcgaagattcggagactaataaagctacattgatctcccctaaattggagatcttcactaatttcaacccctaaactttctacaattcacccaaaatgaccccaaatcaaatttacaattcccccaccaatacattttcactaataatcaattccttttgtgacccactaatcattgttccttcacacctcgctctcaccataatccaatccccaccctccatatcacatctggtcccatccaaaccaccaacacacttcagccgtccgatcctctccgagtaacaaccccacaagcttaaacgatcaagatctctcgaatccttctgtatttcctctgtttcttcttcttcctcttcctctactgatctccaaaacgtttgatctgtcacacttgtcggtgagtttgaaatcaaaccgggaaccagaactggttcaatgtctggtttagttgtcaaaaaaggatggtttaggagttgtgtcgctgtccatctttcatttgcttccctcttcaaacacttttccaaaaaatcttttgcttcttccgcaagcaaacaaggaagctccggagtttcactcgaatacccgacccgataaagaaccgaaaccggatcctccctcgaatctgccttcgtccacggtggagaacccgtaaccatctctatcatcgtacaaccaaccgcccatatatcactctccttcccctgtttctctccacgcgccacctctggagccataaaagccggcgttcccataaccggcgactcgaacaccgggtcaacccgtttcgcacaaccaaaatccgcaatcttggcctcgcctttctccgaaataaccacgttactaccctttacatcacaatgcacgattcctttcgagtgtatatactccaatccttttagtatatcgcgcgtgtacttcactacccgagtctcgtcgactcttcccccgtctttcgccgccgcatcggtcaacgttccatacggtgcgtactccatcaaaagattatacataacgacaccgtttgactctctcttggtttctgatcctctgtatccgatcacgtaaggagaacttaacgacgagagaatcttggcttctctttgcaagaactctgagcggtgaacctcagatgatttaacggcgaggatttcatctgaattgtgacctgcggcggcgtatacggtggctgtagagcctcggcctaggattcttcctctagtccattccatttggagaagactagagaagagttataaaaagaaatgttttttttttgtatgtttgtttgattttgcttttttccactctgcttattcaacagaagctttatataagggtgaacgattttttttttttttttggttgtgaattagatagtgtatacttttggtaacatcgagttttatctaccaacgctaaaatttaaattatgaatataacaacgtaattatgttcttgtgtacacacgtggatttctttttgaggtggataaccaaatgtaacccgtttcgatttgatttgatactactatttttataaaggtctaaaaagaaaccaataagagagaaatgtgtagaatatctgaatatgtgaagttttcaagattacaacaattgagaaacgtgattgaaatatcaactggcgtgtgacctggcaatggaacgtatctaacgtaagttcgttgagtatggtgacgtggtattttttttcgttttgacgagcctgtactctttatattacagtctctagaaagcatgatgtgtcaatatatggttggtcaaaacaacttttagtttatgatacgaccagagtcagagtaacgtatatttctggagcaacgtgtccacaagttttagatgctacgttgtggtttacaagtggactaatgttttattttgtgtaaaggaagaaataattattagaattattgttttgatttgtggtttcttatgagtttggtattgcaaaaatgaaattagtggagaggagaagttgggcacttttggtcgattttgatcgattatctgcacacttaaaccttcctcgttacatttcgtgatcgtttatatctttttttttttttttacatatatactttcttcagacttgcaagattttgtttttacaaaattatttttataaaatataattcttggctgcaatgttttcatctgttgtctattctactttatcttttgttttggtctattatcttgaatattttatttgtttataatagttcttattattttattttatttttctcattgcaaaatatcaataatatttcaatgttttaaatctgtcttcatgcttacaaacaaatgcaacatacattatcagttttcaactgatccataaataaacccgggttattcacaactagggaattggtcgttttataaaaattatagcagaacgagccaaatatctgttaaatacaaatttaaaagaattcatacagaaacaaaatattaatggatctaaaagaccaatcttgatagaattatatcatcttagaaaataaaaacagtctgtttcaaacaaacatattattatttaaaacgtgattaacaattgtattctctgtcctttgaaaattattttcttgctacttgtgttacatatataaatttcttttcctgaaaaagatcactggcaagatttgggttatcattcttctaccggcgaccaaggcctataatattcaactctatgtatttgtttactctaatctagtcaacttgtttgagatagatgatagacgttcgttaaacaaatattgtgacaagcataccaaatttaacaatagaatagattaagaagcttcttttaatgaatcgtttacctcttggaaagaaaataaacgaaagtgagcggtggttttaaccaccattttcggttgatgcttaagaaataaataatcgttttcaaatatgattaggtctgttttatggttctaacttacaacttacattctaattaaagtcaagttcacatatataaccatgactaattaggctaatgatgattattctttcatcacttttctttcgttatttatactccaaatagcttatctcgttatcagtttatgaaccaattttgtcaaaagaaacatttaatgacttaaagtgcaatatagcgtatcatataaatttatctgaatttccgaatatcaaaatggtgcaataaacttcaattgtgtttcaccttaacatgaccaaaatcttagattacaggatcaaatgttccacaaatgcctctcagtaacttttttttctggctatgaaagaaattacaagctttagccaatggttttcatggaatggtacctcaaactcatgtctgttttataggtttaattattctttaaaaaaaaatctgataaataaactaatgttgaaatgtgactcatcacatttatagttttatttgtcggaaaacaagtataatttccgtgttgtttggtaggcttttccagtacgttctcgtaagatatgatatactaactactatacattaaacatttaaatacggagatgtgtaaacactaatgcgtgtttgtaacacatggcatgaaaacaaggatgaatgtaaaaagggcacgaacgccctacttcaagcaataacctactcaaattaaattttaattatacgtatgtcactacaaaagtaaaccaaaaaggtggaaaagtaaataaatgattaccgaaaaaatattcagaaaataaaaggaagcaattattcaagaaccatatatatgagtttatgaattaagagactgttatttaaaagcatgcaaatcttcaaagatttatttaaagtttgattggatctattattatgattcaagaagcaagatcttattttcaaattttgtctcaaccacaaaaattaatctattaaataaaactaaagacaaatctattatgcgtgagaaaagcaaaatagacctctttcgttgcttcaaaatataaactctagatatcaagagtaagacataaggaacttatattctcttctttctagaaaaacaaatctattcgcttttcacataataaaatttatgataatgaataacttcatttggtccatatatatatatatatatataattttaggttcacttatttcaatcggttattatttgaaaagatacatttagctagtaaactttattatatggtgaaaattaattttgagtcttttgcaacgatttgcttacattacacactagctagataattttttaactataaacatcgatggtactcaaaactcgtggtaatactttagtcatataaacttttaattttatttacttatccgcagaacagtacacccagccaataaaatcccaaacaatcatctccatgattaaaaaagggaagcaaatcaagatgataaaacagaaacatcaatattagcaaaatagtaatttctcggtgtcaatatgaacatcgtttcaatattttttaacttaaataagtaaagaaattaaatagaaatttatctctgcaaaagtacgtcactacaaaaaagatcattttatagcacttattttgaataatcatgttcctattttcacttaattttgtttaaagatcagctacgtatttatggtaaaaagttccgttgaatttttgttaaaaatactaattttcctagagagacatttctgttgaaagttgaaacaaaaagtgtgagtattttcacacacaaaaaaagtatgatagtattgatagaactttgagactaatagtaaataaacggttaatcaattctatttaatcaatgaaattgttttgacgttaaaaacaaaaaaagagtaaataaacggttatggtttggataaattgatcaggccatcatgcatgaaggaatcaaagcaattatgaaaattggaaatcatgatatgaatggtaacaacgaaatgaatagtttaaaacaaatagatcagacgacaatacagaacaaatgtgaatagtacaaggaaacataactcatcgtataaccacatttccatatgagagtttaatgagggtagttttatgtggatatctacggtgatcaaagttgatctccatttttgttctagattttactgctccaaacgttggagtatcaaaatttacctttttatgggtttaatgttctttatggtagatttttttttgtctaatcttttaagtgttctctatttgcaacggatgtttaatcagtgaataaaatagtccaaaatatatcatatcatcaaatttgttctcactttttttatattaattatttcaacaaatttgtttttgtctcacttgccattggccatgaatcgcgtggttcctttacctcatgcacgttttatgggttactaatttagtaattatacagaatcacaatttgtcggttgatttgatattagcttggtatcatttgtcggcatgtgatatacaaaagaaagatattggagcaaaactgaatgacgtatttcttatgttggtgagaaaatgtgaacacagcttgggaagtgtttagccgcttctagttgctaaccgacactacacttctaaacaagatcagcacaagatctatcttgttttatcaaagaaaacgtggttactatttaattctgtttctcatgtacttttgtttttgtttaatatttaggttccaattagtaaaggaatgaaatataattgaaagcatttgtgtgattcgaaagtaagagcttattatgtatatgcccaaattcagtagcttttttgaacatgaattatgttaatcattcagtatctaaaatcataactaaaattagttagaaaggtatgatatatccatggcatatactaattacataacatatatacaaatctaatttttttggtgaatcctaacaatacatttaatctcatttcatataagttggatgtattaatccgtatgtctatcctcgagttatattccatatggtgtcctttccctgttttttttttagttttctacttttagacatagtttttaattagtttttttattatattaatgttgaaatctatatgtttataaaacctgaatgaattaaactatctataaaaacttatgttgtacaaaaattttagctgtcaactggaaatgtatattttttttggaataatgcaaaaatgtacaaaaaaaactgtatgagaaagtcttacaaaaaaaaagaaaaataaaatgtttagtaacgttttttataaagttttgtgattaataaccgtcaaagctgtacaactataataatggttacccttcaaatcctttatactttatttaagactttagaggaggctctaatactacgtacattaatacatactttttacaaatactttttgccgacaaacaaaacaaaagtactgtacgtagacaatgctggaaaacgtgctattttgacaggaagacaatctgttatcctatcattttcgcattcttgttgatatgataagaggagctaccattggcttaaattgagttcacattgtcctataaattaaatagatttcccccctgattaagatgtattcatatttttttttatttttttttgataaaatgtgaattatattaccaaaaggaacatgtttatttacaaaagcttggggcaaggagcttctaagaccaaattttttaaaaaagccttagataactattacaaagaaacttgtgattacatgagtttgctaagcatgggagaccattgagagagccgacgtgtgcagcctaagcggaaacgccttgctaggagaatgtctttgatgtattcacaattgagtacttataagctgatataacagacttggcagtaattcagttttactacatgtacactatcatttcctagtttccgggattgaactcattacaattacaaaaagacgagacacatcgatattagtcctaatttacaaaaaaggcttcgaacatttccactcaatactgattcacaagtaaacaaacctctttatttggttcagattaaaagttctaagagcaatgtccttatttaaagatgattgggcatcacacaacgttttgggacttacatcaaccattgctgcctgatggaagaaagcttaagccaagtactgtttcatccaggaggtgaagcgagaccaagcaagctccactgcggcttcatcttcatcagaaagtcccatgcttttccttctgctcactccttctggactcctgttcaagaacgcgtgtccattacctggatagatgtgaacttcatgtgctactccagacgctttcagcttctcttcgagattctttgctgcctgcaaaggtttgtaataattcatgatgggatctcatgtcaatttcagaaaagttgagatgtagtgtagtgtatatacacataccgtgacatcagaaaaaccgacaaaattgtcgagctctccaaaatgagcctgaataggtgccttagcttgtgctggatctgcgagctctgaggaaggggttccatagaatccaacaacagcatccacctcaggaaccaatacagagctagctatagctaatgcacctcccatgcacattccagtgacaccaacctgtcacaacaattataattcatctgcattttcctcaagaattttatgcgaactgaaagaactttgtttaagtttagcaccttttttgagccattggattttagccaattaacagaagcgcggatatctttgatagcacctggccaatcaaggccatccattagatgctgtgcctctgcagtatccaaaccaacctttcctcgatacaagctacaaaatataatattgtgagacgatactcaatgaaccataatttacaaaactgaatcttgcagttaaagaagcactcactcaggtataagggctttgaatccaggctcaagttgtgagattttaatagcatggttcttgatctcaaagtcaacaccccaccattcttgaatcaccacaatcccaggcgcatcatctttaccgaccacataggcatcaaatgtctaaccaacagaccacagtgtataagttttctttagagtaaaatcaagattatagaagaatcatacacaaaaaaatagctaaatcaaatgcatttttcacaatcctaataatcaagaaactccaatgttcaagagaaaccagtctatccatggagagagttacaagcaaagcataacatcgccgaaaactctgaccaaaacaatacctaaactgtttatcactatactgatcatttgtgaactgaaacctaaactcacaatcttccttcttaaatcaaccagttctataaccaaacctgataaggactatgattatacggagatcttcagaagtagctaagcaataataacatctcttactctcattcccagtttctctaccacagaacaacactacacaatcctgaagcagaaacgccattgaaatgataaatcaaatataatccatacatcatacacaacagattccgagatttgggggatatcaaaagaaatgatgattttcattcaacggaaaggataaccaaaatttttttttacttcaaaatcaggcactacggatacagtcgaagcttatgatacaccaaacacaaccataaaaatggcactaagtagaaaaaaaactcagggagagacaaaaaagagaagctcttacagtgtcatctctttggatctgaattttcctgaaagctgaatccgccattgatcgcactgataagcgagaaaacgaaggaatcgaggatctatagagcgaagaagtttttccgattgaagaagagaagaatctggatgaggatgacactagtgtacttaacattgtttttgtgtcttgtgaggaaagaaattcttcagagtcaaccccaaacgacacaaaaacgacgacgtatctgtgagtgtgaatctgggcccggtatatttttaaaaatatatgggccattaggcccaaataatcaagtccttttttgtatttgtatttgtatttgcgacgacgataatacgtaaatagtagtttggtaatatccaaaaagccagcatcgcctctgctacggcgttgtctcttttctcccaattattagcttatatcaatataagaaattattttttttgtggattttgtaaccatgacaggaccagcttgattttgtttttgtaagattcgtggtttctcgatttcatgaaaatgactcaatgatttcgtcctttctatagtattttgggttttaaagtcaactagttgacttcaaaacccaaacttaacgtccatatatatacacatacacagtactgtattatgtgtatatatatggacgttaagtttttgaaaataagagatatatagggcttacgaagccaatatctagataagtgatatcggaacaaaaatcaatcacaaaatatctaccaagagatgtcatatgtgatacgtattaactttatatacatatgattagttccatgaatttgaatttaaaaggtatagtgcatgtatcaaagggcatatatagccacatctcaattgggataaatgaaagagttcatcacgtttcttttcaattcccaaaatggcgatgcgaggaaataaaggcaagttattgatttcgctttctataataattttaaatttttgttgtataacaatgataaagaaacgttcttcaacaacaacaaaaaaatgttacgtacgtgactttaatttgcgtgacgactactcatcattcaccacaagagcaaacggaataaaaagacaaactttatcgttatcctaatttgaaccaaaccacaaaatagccaccacaaatagacaaagatatacatacagcgagacacatcatgcaaaaatgtatatatgtagcttagtggatcattaataatgtttagagaaacgatcgaatttaatgagacttattttcgttgaaaaagttttgatagggtgtaacttaatatatagtatcagtctagtgctaaacatctataagttcaaattccaatttctgtgtatattttggcctccattctacaaatctatatttatttaccacaatgtataatctagacatacaatacgttttacaaaaaaataatatgtagtacatacaccatttgtgaagtcatgtatctatttgacaaactagtccaatggaatttgactatgactaatttattattgtcctttctcttgtgtatctttttttttcttcctaactaaacactactacacattatgggttgattggtatccaataccgctgtagtatggagtatattgctttgataataatcaatcaaaggatgctactaaaaacgatattttaagttttatgatttttttttctttcgtaccgctactttatatcgtttttaaactatttttgtatctcttaccgttttttctacttgctaaaaaacttatacgattttgtgtggccaatcggtcctatattttatatatacaagcattcatagacgtgacgacgcattattttacttaaccctatataaacatatccaaaaaccgcaagaaagctcacaagaaatctcctcccatggcagattcaagttcttctctccctcctctttgcgagaagatctcatacaaaaactattttctaagagttgtggatctcacgattctaggctttctcttttctcttctcttgtaccgaattctacttatgaaccaaaacaactccgtttgggttgtggctttcctctgtgaatcctttttctctttcatatggcttcttattaccagcataaaatggagtcctgcttcatataaatcatatcctgaaagacttgatgaaaggtatcaatttatattacacttacaattatatatacaatcatgcatattaaaagcatatgttcttttaattttgtataaaacctaagtcctagctagctgaaacctaactcttaagtttttttttcctcacgaaatatcattcatttttttctgttatctttctattttagtggactagctagtaaaaatttgaaaatataagactcttagtaattaaataatttcagggttcatgaccttccatcggtagatatgtttgtgactactgcggatcctgttcgggagccgccgattcttgtagcaaacacgttgctttcgctgttagcagtgaattatccagcgaataaacttgcttgttatgtatcggatgatggatgctcacctctcacttacttctctctcaaggaagcttctaagttcgccaagatttgggttcccttctgcaaaaaatataacattaaagttagagctccttttagatattttttgaaccctccagccgcaacagaaagttctgaattcagtaaagactgggaaataaccaaggtaaattaaagggtttaattgttttttcggcgtatgagtttaattttgcaattgtgtttacaaattaaatgatttcgtttactttcaagaagaacacataatttattttcaatcaaacattatttgtaaattgtagaaggtaaagtagaagaaatcgttgatgtttcgaatttgtgttctttaaaacattatgacaatgctgtgatttatagaaagataaagaaaaacaaaatcaattaattagcacaatcagatttttgcgtttaaaacaattgggacgaagatcaaaatttgttcttagcttttgatattaattgttccaaattttcgtattaattattaggaattttcttgaaattatgtttttgtatcaacattaagagggagtacgagaaattaagcaggagggtggaagatgccactggagattcccattggttggatgcagaagatgactttgaagatttctcgaatacaaaaccaaatgatcattcaactatagtaaaggtattattacaattttcgatagtaataacaaatagtctctaacaaaagagggtaattataacaattaaatgacctcttttacgtgtgtatgtgaaggtggtatgggagaacaagggaggtgtcggagtcgagaacgaggttcctcattttgtatacatttcaagagagaaaagaccaaattatcttcatcattacaaagctggagccatgaactttctggttagtgaatttcctcacatctctcttgtatctttctattttatttctgaagttttataaagaaggtacaacagaaattatgagcttagacatatagatataaaattacgtcttttcaaggaaggtaaatagtaaaggtgaaaatgacagctacttctcctattgctaaatatcactcaattgattgctaggcccaaccaaatatgggacaattatgtacaaataagtcccatgtgatatatggctgcaatcattttttcacattttgttgcatgtgacaatccacattaattgttaaaatgaaaggtaaccaaaaacttcctgcttatatatacttttgggtggctaactaatacacggttagttaccaacaccaatgtaaccatgtttatgtgtagctatatttatgtgataattttgcatgcatgtaaaactaaagaatcatagtggtattgcctttgatatattatatataatgtgtcattagcctaagacatcatatatgacatgcaatagtgaacaactatcaacgattgcagctttaatttttaattttgggatataataattaaaaatgtagtaacatagcgtgagatgaatttgaacaggtaagagtgtcagggttgatgacaaatgcaccatacatgttgaacgtagactgtgacatgtatgctaatgaagcagatgtggtgcgccaagcaatgtgtatatttctacaaaaatcaatgaattcaaaccattgtgcttttgttcaattccctcaagagttctatgattctaacgccgacgaactcaccgtcttacaatcagttaaatttctcttactctttatattttttgatcaatttaatgttattaatcgttatgtacgtaataggttgttttctttatgttaaatttagtatttgggacgaggaattgcgggaatccaaggacctacatatgcaggttcaggatgcttccacactagaagagttatgtacggtctatcaatagatgatttagaagatgatggaagtctttcttcacttgcaacaagtaagtactacaggcgaaaacaaaaatgcatatatcattaaaccaatattttagtattgaaaattctatttctcttttttttttttcaatttattctaacacttaaatctatgttctgttattcttctaacatgcaatgtatagtacttttgtgattcatcgttatataatacgttcagtaattttattattcaaataaatcattttaatggtattgttgttatttcattaagggaagtatttggctgaagagaatttagctagagaatttgggaactctaacgagatggtgacatcggtggtcgaggcattacaaagaaaaccaaatccgcaaaatacccttgcaaactccctcgaagcggctcaagaagtgggacattgtcattttgagtaccaaactagctggggcaaaactgtaattagatttaaactatatcacagtagactattaatctaaactcaaattttcttcttattcatagtaatgtcatttgtaatgcataaaatcctgcagattggttggttatacgaatcaacagcggaagatgcaaacacgagtatcggaatccattcgagagggtggactagctcatatatatctccgaaaccaccagcgtttcttggggctatgccaccgggaggtccggaagcgatgctccagcagcggcgatgggccacaggactgctcgaagtccttttcaacaaacaaagtccgttgatcggaatgttttgtaggaaaataagatttcgacaaagcttggcttatttatacattttcacttggggtctaaggtcaatccctgagcttatttattgtctcttgcctgcttattgcctactccacaacgctgccttatttcccaaggtgactctctcttagttctttctgtctcttcaacttcaacaaattaccgaaactcaatttggattatgacatggtgactgaactagcacaaccactaaattcttaatttgtatcattttctcattagtatagtttctatttatttcatataattgattaaaagggaaatgtctaatgttttattttgtttgtggctctagggagtttatttaggtatagtcgtcacacttgtgggaatgcattgtctttactctctatgggaatttatgagccttggtttctcagtacaatcgtggtttgcctcccaatcattttggaggataaaaaccacttgcagttggttatttagcatccctgatatcatactcaagctacttggaatctcgaaaactgttttcatagtcactaaaaagactatgcccaagacaatgtcaggatctggatccgaaaaatctcaacgagaagttgattgtccaaaccaagattccggtaaatttgaatttgatggctcgctttatttcttgcctggcacatttatccttttagtgaatctagccgctctagccggttgttcggtgggtctacaacgtcacagaggaggtggttcgggtttagcagaagcttgtggatgtattttggtggttatattgtttcttccatttctaaagggtatgtttgagaagggaaaatatggtatcccatggtctactctttctaaagctgcctttttagcagttttatttgttgttttctctgtgggaaactagtatactgatatggctttaatttgtagctaaaaactgctaatatgaaaataattattctctaatatacctctggctaaattttagtttctttgatacaaaataaatctaggactataaattcgtaaatagttgatgtacattctgaagtagtgagtagcgtattacttccaaaacaactgcatcgcctcttctacggctttgtctcgttctcacaattattagcttatatccatataagacactatttatttgactgatcaaaaaaaaaatacactatttatctttgtgggttttaaaactatgacaggacctgattgattttgtttttgtaagattcgtggtttttcgatttcatgaaaatgactcaatgatttcatcctttctacttttggggtttgaagtcaactgtttatgtggacgttatttttttgaaaatttaagagataaaatagggcatacgaagccaatatctagataagtgatttaggaacaaaaaccaataacaaaatgaagaaacattacttgacttcattttgtgtgtgacgagtggcgactagtcatcattcaccacaaagcgcaaacttgaatcaggagtaagaagacatactttatcgttatcctaatttgaatcggaccacacaataacccaccacaaatagacaaagatacatatattattgacaatcttttattatataagataacgttctatataattgaattgttttattaataacgaaaaaaaaacgacttcgatatgagtaattaattcgttgaaaaaagtttcttcgggtctagtttttttaaacttctaatatgatattaaaaaccaacatgatagctttcacttgatggtaacttaggatcagtatagtggtggtatctatctacaagtttaattccagtttacgtgaagttcataaattttattggtcatatcaatgtgtacaataaatatacgttttataaataaataatatttgcattttttattcatgtatctaaataacaaactagtccaatttcacttgactatgacctctttgttcttttttttgttaatagttttcacaaaaaaagcttactcaattttatatcttctcatcactcctttttattataagtgtatacaaattatatatatattttttacttaattcttagaaacatatccaaaaacctcaagaaatctccttccatggcggaatcaagctctcctctccctcctctttgtgaaaggatctcacacaaaagctatttcttaagagctgtggatctcactattctaggtcttctcctttctcttctattgtaccgtatcctacatgtgaaccaaaaggacaccgtttggatcgtggctttcctctgtgaaacttgtttcaccttcgtatggttgcttattaccaacataaaatggagtcctgctgattataaaacatatcctgaaagacttgatgaaaggtaccattttcctatatatacacaaaaagcaatattcttatcaaacttgtatcaagtcctaatatatcatttcattttagttgagtagaaaacattcgaaactaaaaatttgaaatgacatagcaacttttcatttcagggttcatgaacttccaccggtagatatgttcgtgaccacagctgatccagtaagggagccaccgcttatcgttgtaaacacagtgctttcactgttagctgtgaattatccggcgaacaaactagcttgttatgtgtcggacgatggatgttcacctctcacttacttctctctcaaggaagcttctaagtttgccaagatttgggttcctttctgcaagaaatacaacgttagagttagagctccttttatgtacttcagaaactctccggaagcagcagaaggttctgaattcagtaaagactgggaaatgactaaggtaaagggtttgtttgtcttttacaaattcttcaaacaatgtttatctataatttttttgaaaattgttgtgattgataaaaatataaacaagttcttcagccaattaacacaatgacatttgaattttaaaaaaactgaaaaaaatcaagattcattcatttcttttcgtaataattattgggaattttcttgaaattgtgtttttgtattaatataaagagggagtacgagaagttaagccagaaagtagaagatgccactggaagttcccactggttggatgcagaagatgactttgaagctttcttaaacacaaaatcaaatgatcattcaactatagttaaggtaattctacaattttccagagtaaaatcaaataatcaccacaaaacaaaagagttaattataacaatttcattgaaatcttgttttatgtgtttatgtgaaggtggtatgggaaaacaagggaggtgtgggagacgaaaaagaggtccctcatgttgtttacatttcaagagagaaaagaccaaatcactttcatcattacaaagctggagccatgaactttctggttagtaaattttctcacacatctgtcttttttttttttttttaagtttcaagtaaagtacataagaattatgagcttggacatatagaggtgcataatgtcataatgcatgtatacgtcttttcaaggaaggcaaaaccagtgcaacaacactcatggtgcctttgaaattgatatttaataatgagccaccatagactaatttagcctaaggcatcatatatggtaaagccatattgaacaactatatatcaatgattgtatatcttagtttatgtggtttgttatagtaatttagaacatgatgacggagcctgagatgaatttgaacaggtaagagtgtcagggttgatgacaaatgcaccatacatgttgaacgtagactgcgacatgtatgtcaatgaagcagatgtggtgcgacaagcaatgtgtatatttctgcaaaaatcaatggattcaaaccattgtgcttttgttcaataccctcaagatttctatgattctaatgtcggtgaactcaccgtcttacaattagtaagatttatctctttactttttctttggtttatttctaatgttaatataataaatttcagtcagctcgatgatttatatttgttataccaatccgtacttaatcttagttccttttatttattaaaaaattaactagtacttgggacgaggaattgcgggaatccaaggacctcagtatgcgggttcaggatgcttccatactagaagagttatgtacggtctttctctagacgatttaggagacgatggaagtctttcttcaattgctacaagtaagtacaaccaacaaagacataaaaaaaccaatcttttagcatgcaaaattctgatgttttcattaattatactaacatttttgttattccatcgttctactattcacatgtcaaatcattcacggttctcgttgtaatttcattaagggaagtatttagctgaggagagtctaacgagagaatttgggaattctaaggagatggtgaaatcggtggtcgatgcgttacaaagaaaaccatttccccaaaaaaaccttaaggactctctagaaacggctcaagaaatgggacattgtcactacgagtaccaaaccagctggggaaaaaacgtaattctcttctcaaatgaatcactatagtattttagacaatattaatgtgttttcttatatataaatcatgtagatcggttggttatacgattcaacaacggaagatgtgaacacgagtatcggaattcattcgagagggtggactagctcatatatttttccggatccaccggcgtttcttgggtgtatgccacaaggaggaccggaggtaatggttcagcagcgacgatgggccacgggactgctcgaaatccttttcaacaaacaaagtccgttgatcggaatgttttgtcggaaaataagatttcgacaaagcttggcttatttatacgttttcagttggggtctaagatcaatccctgagctcttttactgtctcctgcctgcttattgcctactccacaactctgctttatttcccaaggtgaccctctttctcctttgttatgatactaagacaacaaaacaagaaccactagattacatgtctctcggtctctctttaactatatcataagccttattaatatttatctacttattttatagaatttctttaggggaaaagtctaatgtttttcttttgttttttgctctagggagtttacttaggtataatcatcacacttgtggggatacattgtctttacactttatgggaattcatgaaccttggtttttccatacaatcgtggtatgtcactcaatcatttgggaggataaaaacaacttgtagttggttatttagcgtccttgatgtcatactcaagcttcttggaatatcgaaaaccgtcttcatagtcactaaaaagactatgcctgagaccaagtcagggtctggatccaaaaaatctcaacgagaagttgattgtccaaaccaagattccggtaaatttgaatttgatggctcgctttatttcttgccgggcacattcattgtgttagtgaatctagccgctctagccggttgtttggtgggtctacaaagtcgcggaggaggtggttcgggtttggcagaagcctgtggctgtattttggtggttattttgttccttccatttctaaagggtatgtttgagaagggaaaatatggtatcccattttctactctttctaaagctgcctttttagcagcgttatttgttgttttatctgtgggaaactagtatagtgtggtaaggttttgttatgcacctatcgttaagtgtatcatgacattttctctattgataatgctatttatgcaatttgttttattgatcgtacgtaaaactaactaatgtgaaaccattcaaagcgttgaattacaaatgaacgttattctgacatacagcgatctagaattggcaagctagttttgtatgtggtatatatcaacacaagtatcacaacgaaagaagatgaaactaataaatgttttcttggttatttttttgttgttgttgattagagtcattttaatcaattgaacaaaatgaaatacatcaaaacttttgttaaccatatataattagatcattcagccattccagtgattcgataaatctttctctcgtaaagtctgtttgtaaatatggattatctactatggaaggtccttaaaagagaagaatatgaattttctgaattatctactcatctgaattttcttttggctagttttgtgtatttctaacaatatgtatacaccattttgtcaacaaatttatggattttactagttagtactttaaaatatattttttcgcatttgttcaatagtacaacaattaaaaaaaattgccgattgaaatattaaaaatactaaaaatagtaaatattgcttactcacaattacatagaaaaccacaatatatattaccaggtctaaaagtgtcataattatagattaagaaattatagctcactgtaatataattctcaattaacatcttacacttgtctgtggataagataacttcatacaaattaagctttttctctggtcagaatacagatttagatttctaacacaaaaataatatttaattaaaatccaacaaataaataaataaattaatttttctttctttggaagtattattactttttcacattgacaattaatactatcttttctttatatttaacttaacaaataaggtctacatagggtactttcgtctaatcacaattttaaagccatgcgtgcattgccttagtctatataacttattctcccactcatcgactgccacaacactcgtaaagaatctgcgacagagattttctccgaccaatccatgtcggaaaacatggtgaatctaccggattctttgtacgaggactacagtaaactcaagttgacttcaccctccaacgcttcttcatcctcctcagctcctccgcccaggctcagcgtcgtagctcatccaacggtagagatgattatccagtgggtctgtgatattcataaaccgaagtcatacatgtctgattttgcgctgcataatctcgcctatgtaagtgcaacaaatactcttcgatgctctctatgtttgatatggtttttgtttgatctgtcgtctctatgtttgattcaacatgcttttgatctttgaatcctatgaatacattagtttttgagaaaagttttttttttttttttctgattatgggaaattcttgagatctccgtttgtttcttgctgcataggttaacgtctttatccctacaatataatatcatctactctcgttttcgccgtcaaatgatagattttattcgtatctatcttagatttggttgcttgacatggaatgttcttgtttgtgagtcaatttggctttcctttgtggataatcatattcttggagcctacatgagaaagaataaattgtcattctctcttttgtttatatcatttggtcgatttgtggggaatttatcgttggatcggctttctcatcataagaaacattcaattgttattcctcttttgtttgtatccatccattcgatgattaaaaggcgttacatcgatggagcggcttttgcaatttcattaggttcaggagatctcactgtttttctaataataagagatattcaattgttattcctctattgtttgtcaacatttgaagattatcgctattttctcgttagatcggttttcgtgattttaggtttatgagatctcgcaatttgtctcatcacatgaaatattcaattgttattcctcttttgtttgtatccaatttgtcgattttcgctattatattgtttgtcggctttcacatttttttagggttaggagatcccacaatcatttgtatcatcgtttctcaaattgctctgtttttcttgatgtgctcttctttaggttataatatttttaagcctagatcttgttcttctgctcgttcttcatttatttctatattgtattccgatagataagaatttgtgtggtttagaattacagcgtatcctgatagataataaagtgtgtggttaagaattacaacgtatcaagatagattataatttggatagtcaaggattacattgtctagtaataaattttgattcacttttatgatattgccaattgttatgcatttaaaatcctctacaaatcaattctttgcaaattgttttccaaattcgcggtaggtaaaaatgacagctaatcatatttgtggccctatacaagtatagtaatttatctcggtacgacctgaatatatggaaatccaaaattttataatttggaaaaccaaaaatttcgtaatttggggtattttgatcttatcgatattcgagatcttatctctagtatttctttagatatgcaacattggaatttgccttaatttgtccataggttgagaataaattcactcacacttttaattttttgaatgtcacaaacttatatacaatctagtagtcgaggaccatttaaaaacatttttggaatgttaacaacttatattatctctatcctttttctccaatggcagcataggaacgactttgagttcttgccgagtctgttatgggaatctaaaaatactgtgtacatcatgttgcaggttaagtacccactactttggttatttcttttggctttttaaaactgattgtttctaaatcttgccatcttttttctgtataaacttctctatatttgtgacactcactttaaatttaattcaatctatgcaggaggtttttgaagcctacagacacctcgcaggacacatctcacttcgattgttccctcatccgttgaatccacttcgagtgtacaatgtttttcttttgttccaggttttgttttggtctcacacctttctttttttcttaagtttaaaaaccatttctttcataaatgcttaagcctaaacttgctctgtgatgttatcatcgtttttcctgttacagagcatggcttgtcacccagacacaagccgtcagtttcttaggggtatttctttctcctcttgtgcaacaaaccatatgatgttgcattgtctttgaaatttttctgcttatgttggttgatttgttgcagctaagatgccaaattatttctatcctctgatggacactggtctcattgataaaagtgacgaatgcatgaggcttgctgcgttgggtgtcattgctcatatgttgaaggcggtaccacatacatattctcttacaatataatctgtttgtgacaaatgctattgaaaaccccactaaattactttgaacatctcacttctctatagtctgaagatggagctgttaatcgttacctaatggaaagtggtgttgttggtttctgcgttaaacccattgagtttggctctacagaaacaaaaaaagtaagtttctttcgcacgctacttctactcattttgactataaatcaaagaagaataaagaaagcattttgaaacttaatacttgttgttcaggttgctttatacatactcgacaagattatgtcgacggatcaggggctttattactgctgcgtcttggctgatcggttttacgttatcgatgagctccttaagaaggtgctcttctatctttctaacatggtcagacctccttcatccttgttcagccttgttactggttgctacgtcaagctctcccagaactccaggttttcttgctaaacctcgtgataatattttgatattgatacaaatgattaggttttgtaaaagcaaacaacagtttgagtttttggtatatgcattagggctcgtaacggaataaggcgatacacgcctttcttgctgtttgacggcaccttttccagattatatgctgtaagatttcaatctcttgtgttttttggaatttgtatggttttggttcatgcagggaatagtaaagcttatgtgtgtcttgtctgttttttttgtaggaggatccagtggctgctaacaatcgaattcagctgcttcagaatctggacaactaaagcaatgaagtactcgagacactgttttcaatgaggcaatgaaaacagaacagcccccacagagtacgggtttagtacgcctacgcgtaaacgctaagtaataatttactaaagacataaaaactctatgaaaagtcttatgttgttgtttggtttaatatcttttggatgactctcgttactctttcaacattgttttctctcttttggaatacatttcaatgcactttgccattttctatctatctttttcaactggttgatagcaatcggatttagctaatttgcttaactatttgcaacttgatgatcttgattgatataaaaaataagttagggtaatgttatttagatgtaaagcttctggaagttgtggttttgagttcctctgagttagtttaagcaactaggacttttagaaaagagacctgaaggtgagagacatttcattgcatggccagggcccagaggaatattgattattaaggggtcttttgagttagccaaacttgcgaaatcattccacatccatagaagtctagtatggggggttttgtttgccatagttgccccattcctattatgagtcagtaccattgccaagcaaaatcagctagaaaccaatccccaactttggatagaataaacattttaaagaatttgtcacattgaattatggatagtatttactactgactgtgaatgttacccgccacatgcctctggagattagtcggaatttggctccggaatcttttggagtaaaatagtcaaaacatgacggagtaaaaaactaaaaaaagcatattaactcaatttacattttcttaattcttatgggttactttacccaaaattgaaccaccgtcaaaatttgagtgcaacagtaaaaatcagagtctcgaatccattgggttctccaattttcgccattgcaaacagctaaaattccaccaaatcccagctcgaatttggaacccagatcgccgaatctcgtatggtggcgttaaaagtccggcgggcacctcacgtaggcctcagccgtttccgcctcttcgcagactcttctgaccttccccaaaggtaaaatcacaatggcccttgattggtttttgcctcatcggctctaaagtttactgctttcccctgagaaaatgagtaaaattactactttttcatatttggtattgttagcaatttgaaagtaggaatgattagtagttggtttagtttctggtgattgagctgctttagcttgattagggaatgagtttgaatctctctgcataaacaagaattttgcattgtttttgactgttgtagtatctccggttatttggcttgataagtaggcaatgatcagtttttgatatctatagttttgaagatcttagagatgttaaagttttggaggctactgttccttgtttaaacaaatttgagtctgaggtctctgacttgtggtgtggttgagcatcctgttttacttcatgtggctgtcgtggtgacaccgaatggcggtgtatgcttatatccttaatctggtttataggattcactctaatgacttcatggaggttgataatgttgtttaggatgacttgtgatcattgcttatttactatttttgcataattgtttatttactactaaggtcatccccatctcttcttcttcctcttctttattggttggttatgtttttataatatagttttccttcacttttaatattgtaggttcagtgaaccttttgttctgtgtctggccagatccaattctatctcctcccactgtccttggaaatcccaatgccaccaccaccaagtagacctttttctatataaattcttctttttattctttaataagtaacccccttcaatttaggctttgtttctaaggcattttctttcctgtaatctgggtttttgtgggtccaacacactctctctctcttgattttaacaacttggcaacttcattcaatttcaagttccaaaacaagagagagagagagagagagagagagagagagagagagagagagagagagagagagagagagagagagagagagagagataaagaatattttattgtgtccatgagttggttaggtgatcctccaattccaattggctatccatctatcctcttcttttatttatactctcagaaacaagaaatcaaaaaggcagcacaataatactgtctaaatgcttctctactttctcatcacttgtctctctttctttttctttaccaaatctctttctcttcctccatgggcatctgaaaccaaaaccttgctctccttctacttcatcaagaatccctttatgaacaccctacatcagaccaaacacgatccagcctctccggtgatcgaccaaatgtcggttcttgacctccctgagctggctcttgactgcattcttgaccttcttccaccctctggactctgcagcatggctagggtttgtagctccttgagggagagatgtgttagtgatcatctatgggagaaacatttgaagaccaaatggggcaaaatccttggccctgctgctcacagagagtggcaatgctatatctcctcttccacatatcatcttgattctcctcatcatcaaactgggaatcttggttttgccaaaatcatctctctgatccgatctctttcatccgttttccgagaggataaacaaaggaggggatatgcatcttctctgccacttgattccagcatgagctgctacctctcccttgaaacaggtcgtttttggttcccagctcaagtttacaaccgtgaggtaatcatttcataaacatagttgctccatttttgctttatggatttgattaaagtactaagaggcttttttttggtgaaagagcagaatggacatgtagggttcatgttgtcatgctatgatgcggagctcagctatgatactcacacggatacgttccaagccaggtataaaatatctaatgtccacatttgacgctaacaaattttcttatttctcatcataagtttacgtttattggggagtttaggtatccaccacatggtagacgagcatctgcgattgaaaagggtgtgacatgggatagaataagagcagctcccattgatgcatcacctcatcttctccatgtatcagattctttaaaagagttgaaacctggagatcacatcgaaatccagtggagaaggaacaaagagttcccatatggtaaataataataatatgatgcttttggtttgaacttgcaatctgattctgaaaaaagcttgtgtgatgttgttgtgtaggatggtggtatggtcttgttcgccacttggaatcctgtgatggagatcataaccattgccattgccatcttagtggtgagttctcatcttcatcttcatcttctgtggttaaaaaatggagtcttggttggttgttttaaaattggctgtcatattctatgcattactcattgtctcagctcataaagtccattaaattcccaaaacatagttgaaaagggtgaacattgaagagagccaattcaagcaatgccttttcttgttaagattggtcccaaaacgacaaatgatgatgataatgtgatgatatgtcttgattttccttgacattttgataaatgtgtgtcttcagttgatgttgaaacctccacttatgtcctcatcgttggaatttgcattactaatgggtgtggggctcaacaatgattctgtctctttatcactccaaaaaaatctcttatttttatcattttgctggcacattgcatgaccacataaaagtagaaatcacatcgaaatagataatttttgggatttctctctgcccacttgcatcttgatttaacctttgtctactgataatgtgttaaacgagtttttgcattcacatgttgtactaaattgtcaagtgttgatgaatggtaaaaacagagacggtagtgttggaattcaaccagtacacagtcggatcaaggtggagaagaacgatgatcatgagagatcataaagaggaaggtaacgaagaagacgggttctatggaggaatccgaaagctaaattgtaaagaagagattgcaatgtggaaacgtcactggccttgctccatcttggaatagcattaaagaagctttgcttaaacacatggggaaagatattacacatcactatactgagagtaggttgttaaatttagacgtctattctcttttatccaatgtatggttgatcgtgaattatttgttgggaataaagtctatacgtgaaattattgtgtcacttcgatttgagaaatattgtgttgtatagggaaaacttaatacaattgatttgaatactcaaagagcattttggttttgatcttgttgccgcttgctatgtcaagctctcccagagtttcaggttttctgctacaccttctgatctcctctgaatttttttacatgccctatttagaaatacacctttgtcacaatcagtatccaaagacaaagtttcatactgcccattgtctgttcctcattcctatcttgagtctttttttcttctgcacctcatcagtatcattgccaaacaaatcatctgtggagacagaaacattgaaaccacctgttgggtttgcatcaaatgaacatgtcgctgctcctgggaaggattgtatttgaaagtcagaatcctaatcagaagaagagacaaaaaaagaagcttaccattgcagcattagttgctccactctcaataaacccaaactaaagattctcatcttcttgagaagaaagattcctgtagtcatattttccttgcaacaaagtagcaattccatcgcctaacgttatctaataagtagcacttttgtaacgctataaggaggatcctccttagacacatcctcaatagtcaatacataaagtcatagatatgtctctacacagcttcgggattcaacgtagttagaaaattagtatctgtaagtcaaaaacatcaccgagtaaaaagagtccacccattaactcaagtctcaacttacactttgttttattggtcccatacctaagtatagaaaaccattcagttgaatctccaccgacaccataatctgagtgcaagagtccatactctccatcagagagactcaaatccaattctccttactgcaacagctcaaatttggaatcttttgtaaaaacccagatcagcggatctcgaatggcgaagcacacggcagcgttgaaggtgggactagctttactggccctcagcatgattggctacatacttggtccaccgctctactggcacctcacggaagccttagccgtttcagccacttcttgctctgcttgcgtctgtgattgctcttcgttgcctcttctcaccatcccaactggtaatcactatttccctttattggatcttgcttgatcggctctaaagtttattcattttccctgagacaacgagagcaaatttagtacctttttcatatttggtattgtttagtagtagttggtgattgagttgccagattgcatgctttagcttgatgagggattttgagtttgaatctctatgcagatagatagacaagaattgtgtagatctacaagaattgttttgtttctctgattatttggtttgataagtatatctgaagctatagtttttggtcatggagatttgaagtttgcaggctgctgttcttgtttaaacaccaagtttgagtctttgagatctgacttgtgttgtgatttagcttctggtttacttgttctggtcattgtgacttctaatagcagtgtatgtggtttactctgtgtttatctttatctttatccatgtatgtgattcactcttaatgaattcatggaggttgatatggttgtccacaatgccttgtgatcattgcttctttactatctacaaacttctttatctactatatgtgtatttttcggatgataccaaaaataaaaagcctaactctttttacttgttttcatattgctgcaggactcagcaatggttcattcactggtgagtttctctgtcaattggattcatcagttaaagagttcccggaagaaaactcttgactatgtttttagtaaatgagtcttttaagaacatcttgtcttttgatgcgcagattgtgcaaagcgtgatccagaggtgaacgaagacacagagaagaactacgctgaacttttaacagaggaactgaagcagcgtgaagcagcatcgatggagaaacacaaacgagtagacacgggtctgctagaggccaagaagataacatcatcttaccaaaaggaggcagataagtgtaactcgggtatggagacttgtgaagaagcaagagagaaggcggagaaagcacttgtggagcagaagaagctgacttctatgtgggaacagagagctcgtcagaaaggatacaaagatggagccaccaagtcaactgttaaatccaaaagcggcactgaggttgcttaaggacacaccaaaggttttgatttcttatcacacgaaagaaaagtttcagtgtatctgtgaatttgattcatactattgtatttaagttttctgatggagataaatcaatcagatggaatgaaaacatgtaaccaaaacaacaaaggattagtggattttgaacaaagttacaacacaatcaagtcattacattgaactacaacatacttattaggcatagtgatgagcacaaaggcactctctaaacactcggcttctccttttggtctatcttcacttttctttcaggcaaggtgtattgttagatcatccaagttttgagaaccaatgaggctgagattgtgctcgttcgccaaatgcagcaagcagatgaaacatagatgtggtgagatgtcttgggttctctcggctgcttggcaatcatctgggaagctagccaatagcactttgaaagatctactttcaggtggttcttgttgatgttcctcatcctgcacaatcagattctgttaatatcatcacagtaatgggcagaaaagaaggaaaagccatccttgggttagtttcggcatggaaccataagaaaaaggtgcactgcactaaacaggaatgtatgtgtgtggaattctagattgtatgttgacaaaacttggctgatgtgaagtacacgaatgagtcatgtaaatcataagagagataatcagagtatattggttaacctgaattggaggttgatgagattcctgaagacactcccaaagagtttcctttagcacttgcacatcaacttgttttgaagctttatcgtattggacatcaattttgttgacctaaagcatgagttgtgtaggataattacaacaatgtttcattcctaagatagatagctacagccttttaaaatgatttgtaatgctgtaaccatatgcagatcaatctatcatacctggcgtggctgagagattaatgtgttggtatcctctgcatcactttgatcattttcattatcatcgaatgggccatcatcatcatcataaacattatcatttccccaggattccccatgttcataatcatcaggctgctgtcttgaagtttcacctggaatatgcacataacaaaacaagtgtaacataaatatttttttttcagaaacccaatacagatttagtggtaaattgttgaaaccatttcctttgttacggaaatttaatatcagtaaagaaaacaaagacactgttatacgcctcataaaccgccacggataccaacaagtgatgattttcttaatgactggaagtgttacctgagttttttcttctcctcctcccaaggcactgttatcattcaggagagtaaattcagaaaagatgacacaaaatggaaaagaaaagataaaaaaacacagaaataatagcaaactagtgacttggtctgtgtttggcaagccataccatcacattcggtagtagaaatagctttattagattctcaggttgataatggcaatcctctggaagcttcgtttgacaaggggttctacttgctgggagaagtaaagtctttgggttttttggaggggcaaaaatatcaggcatttcttcctccaaagcttttgcaaaatctagttcaggctctgcttgcttctttttcctggttttcttcgctggtggagaggatttaatttctgaagcaggttgaacatctggacctgcaaaaagagttcagagaatgtaaaccctcagaagaaaatcgaaaactaagaggacttatgttatttcttgaaatcagagatataagcgcataccttttgtttttcgatacttccagtgatcaggacctgcccaagaattttgcttagatgaaattcccaacgacaaaaagagatagtcatcaacattctccagtctgtcatctgaatccatgtcttgcagggaggctggttcaacttcctgcaaagtgaaaacattaggttttcagtaccaaataaaattcattaagaaaaaagattattagaagagcgatggtaataacctcatgaaaatttgaatatattggttctgcttcattggggccaaagttttcatcaacatcaccggattgaccctcataatcaaaagaagttccaaagttctcatatccttcatcatcgtcggcatagctagcatcattaccatgtgaaatatcaaatgactcggtcgtctgctgaccacaagaaaacgtgtcagatggtctttggttctcttcatcaaattgattgattatagcccgaagagatggtacaatctcatccttctttcgcatgtttagcaccatttgctccacacattctacaaatttaaccacaacatcagagaaagcataatgcaataaaacatgtacaatggtagagcgaggcatatcagccagtaaagccagacctttaacaaaggatagatcaattgtttctgatttgtcatgcttatttgcagacgaaacaagctttccagggatttcttgtgaatcaaatagaacttgacaccctccatagactcctaaattgtttagcagcaggccctttgctccaccttcatcaaactgtgctgaagtctgatgataaaggggatccactgcaaatgccactggaaagaaaaaagaaagataaattattgtcgtacataacttactttcacaaacgaacaaagggagttacgttaagttaagcaaataccatcaaatttcttcacgttaagggcatcaaaggaaggttccagtgttgataaaggcgatatctgaaagttcgaaacacatcagtaaatagtctcatctattaaatccagaattagattttgtgtatgaactacctttttctctggctgcttcttttggttagttgcattttctacggcaccagcagcatcctcgtgatctagttcatgaaagaaatatcagaaaagaatataagaactttttttactttagtacctacgttagaaattagagctaaagaaagaaattcaatgcattgcatagccctcttcagagattttaaattctcgtgtagaagtcaaaacaataagaaaagtattcatctgtttacctaatgagtttcaagactagtttggcaaaccatattaacaaaaatgagtgaataaatatctccacaaatagataaagctacatgttgtctgttgaagtttaccctgacagttataaccaagtactaaagataagatagtttcttgtgtgtaaggttattaatctaacctccaccgtcatcatggccagctcgggtaattccacccaagaccttgtatgcctctgaatgaacagagtctacccgcattgagtaaatcttaactccagcttcaagagtgcaacttgcctgacttggacgaacacatatgtcttaaatatgattctgaactcttgtttttcctttcagttttatgtttttgtgtattctcaaacgtcttaacagcattttaaaaaagccaaagaagaatgaaatcgaaagcttaccttttgaaaatttgtttctgtattgttctcatcttcaactttgataatctcacaaagatggtcgatcaaattcaactcccatgtattcttttgattgattttctgtttaacacaaaacccacataacataaattaaattgcaaagctaaacaaagattatagtgattaaaaagctacttgtaaatctcatcagaagcatatttacccaagaccaaggtcaaagacaaggacttttagccacgaattttcctttttcacttgctataattatgggggaaaaaaagacagaagaaagtagttgcttacgttttcactggctaatttgatacagttctgaaacaactcgagaatttgctgtttgtcgaaacaaggatcagactccgtctcaggctgagacccacgagcgaaaatgacagacctacgacggctagcagcggctcttgcggctcgagcttgttcccgttccaatctgtcatcgttagatcccaagaagaagggactcgtcggagcctggattcgagtcgtcgttgaagctggcttttgcttagggtttggagttaaggattcatccatgacagaacttctccgcttgtataaactcaatgagagaaaatgcgtttgttgggttcaccggagctttgtggatccgagaaaattcaaaataatttgggaattagggattttaatattttgattttccctcttctttacccttttgaatttcagagacactgatgagaatgtgtaaatacatgattacccccgtcgaaaggtgagtgacgtggtatactccactttgatcatcgttagaaataatttaaatatgaaatatccatggccggtcataggactgatagattgggttaagacttggttaagagttaaccgatatataacaaatgaattttgtttcgccaacgctaattgtactattaacggaaaacaatcttgtcaaaatggtacatacgagaagcagatagaagaaactcaaagaaggtatctagagagctaatacatccgtagagatcacagctttgagaatccatgtcaaaacagatttgtttttcagtcaaagagcaagtctctcttagtaaaccatgatcagagtactgtgtttttaaactgcttcgctggattctctttcacatgttaggatgtccgaaacctccagctggtggcatgggcctaaaaccattgttagccattggaggtggtggcggtgggaataaaccagatggaggtggtggtggcggttgagcttgatgaggcgggggtggtggtggcggtggaagaccatttgctccaacagctgactgaggcttgtttggttctggcttggtaggcttgaaatacacctgcagctgttttattacattctttgtcagtattttgattaatccaaacacaaaacttatccaatctcggaaaagaaactaagcttatggctttatgagaattatgatgagaagcacttactgtaaacatcttggagtctggatcccagtgagagaaaaactttggggttgatttatcaacctctgtgctaggaacctgaaaccaatgcgaaaacacaaccatcaatatcagtaaacaattcgaccaagatatgttgggctactagagctataatcccagatgacttgtagaatgtaaatgtcacgaataaaagaaaaaaaaaacacataccttgaaagctatgatttcatatggttcggctgcaaatagaaggtattgatagctcttgtcataaggttgaactttctgcacacaaaaaaaaaggaagaaaactattcagtatgaaggaaaagaaagagtttatgagatacatagacaaggagttgtaacactcacctgctcataagatgacatgaaacgatgtcttggctttatgttgtcctctatctcaggatattcaatctgtaaaacattgtttgaggagtaaacagacacagtgagattttactctggctaagtctctaatgatgatcattgaagttcaacaataacaattagatgcttacctggaacagaagagatctttgttgcagctcgggatcatactgttttgtaacccggtaccctggtctaccaattttaactgcaagaccatacataaaatggagttattaataaaccctttaaagcaatcaattaagtaaaatctatgtactcaatagcaaagatatacaattttgctattacttctagacaatcactttcccattatatccaattccaggcctaggcagatttgatatcaacaatgggaataaagctgtattataattatagaaaataaaacaacttattacctgttctgcgaactgagacattgcgcttgagtggctgcggcttagtaggagcatccttagcctctcgagcagctctctttgccaagtttgtctgatgcctcttaccttgagtatgtgccaagtagtttccttcattgttatgcagtgttagacatagtttacactcatagctgcacaacataaaaacacaccaaaaatcaaattagtggcatgaggggaaaattaaaaaaaagaacctaattctagaaacaacagccaaacaaactcaagagctatcacacatatgaataatcaaactcaaaacggagcaaaaatgtagatgaagttggtaaaatcacagtattcataaatctcaggttgatcatccaacaattgaatctgctacttactcgtgcaacaaagcatacataaatacagtaacataccttccaagatgatttcgcatgaaatacggatctttagcaaggtctatggtttcaagagcaagacgacggagacgctcacggcgatctatggcctcgttttggccggaggcggcgccgccactaccaggcttggaaccccattctctatccatagctgctactaggatctcctttcacgctaactaatccccaatcggtccttctatgctctcttgtgctgctctctcgattgctggaaaattttgacaattgctgagatttttcttatgacttatgaagattggggaaaaaaagcacagatgggggagattgggtggtttatcagagaccctaatgtgggttgggtttcgaataagatgagacagtttaaggcccaatatcagcccatcaatgtgttaaagagaaaataacgtcatcaggttttatttcatacatgattcattataatgataaactgattaaattaaaatcctagatagacagacaatttctgctttcacttattggaatttataatcaagctaaatcactacttgataatataataagaatgatataaattactttaaaattattattaattatcaaataaatgcgtgtaactaatttcattgctttaaaacatgaacatcaatgtcttacgttacttcttccacaagaaacaagtaagactttgactttttaggtttcttgttctcgtgatcttcacgaaggtgaagcttccctgcttatagggaatcatcattaactcttagcacattaattaggagtttcccacatgcgtatttatatacaagcatgaagcattcatcgatgtgaagttcgaaaacatatccaaaaactgcaagaaagctcctcccatggcggattcaagcttttctcttcctcctctttgtgaaaggatctcatacacgaactattttctaagagctgtatatctcacggttctaggccttttcttttctcttctcttgcaccgaatccgacatacgagcgaatacgacaacgtttggctcgtggctttcttttgtgaatcttgtttcttcttggtatgtctgcttattacttgcctaaaatggagtcctgctgatactaaaccctttcctgatagacttgatgaaaggtatcattttcgttttacacataaatcatatatacaaatattatttttagcatatatacaatcattattgttattaactttgtataaagtctgagctagtttgctacctagccttagtttaatcatcaagataatattcatttctatgttatcttttacgtaattcattaacctggcatataaaatattgtaatttcagggttcatgaccttccttcggtggatatgttcgtgcccacagcagatccggttcgagagccaccgattatggttgtggacaccgtgctttcgctgttagctgtaaattatccggcaaataaactagcttgttatgtgtcggacgatggatgctcacctctcacttatttctctctcaaggaagcttctaagttcgccaagatttgggtaccgttctgcaaaaagtacaacactagagttagagctccttctagatattttctgaaacctataagcgtcgcaacagaggattatgaattcaatagagactgggaaaagacgaaggtaaaaagggtttgattattttttaggtgtatgacatttttatgtttacaaataatattattgtgcttatttacagattaaattcttgttttgaaacaattgagatacctaataaagttgcacatgatctgaagatttgttcttagtctttcatcttatgtattgagaaatttcttgatgttttctttttgtgtaaatacaaagagggagtacgagaagttgaggcggaaagtggaagatgccaccggagattctcatatgttggatgtagaagatgattttgaagcattctcaaacacaaaaccaaatgatcattcaactctagttaaggtatttaaaaaaaattccttaagtaaaaacaatcaagtttctaactatagttatatacgcacacgttaattgttttatgtgtatatatgtgaaggtggtatgggagaacaagggaggtgtaggagacgagaaagagatccctcatatcatatacatatcaagagagaaaagaccaaattatgttcataatcaaaaatgtggagccatgaactttctggttaatgaattttcttacacatctctctctttttcttcttatttttttctgaagtttcacatcttatatagtgtattttttttttttgttgtaccgaaaatgtgataagcatatgatatgatgaatttgaacaggcaagagtgtcagggttgatgacaaacgcaccatacatcttgaacgtggattgcgacatgtatgccaatgatgcagatgtagtccgacaagcaatgtgtatacttctgcaagaatcattaaatatgaaacattgtgcttttgttcaattccgtcaagaattctatgattcaagcaccgagctaatagtcgtcctacaatcagtgtgatttcttcttttaaattttgtttatctataattctaatcaatacattgttatttatgatatgtcgttttctttgctaaatttagcatttgggacgaggaatcgcgggaatccaaggaccgatatatataggatcaggatgcgtccacacgagaagagttatgtatggtttatctccagacgatttcgaagttgatggaagtctttcttcagttgctacaagtaagtctttcataaaaatcttcaaagcgttatttaaaacatttttttattgacccttgctgttgctatcaaggggagtttttggttaaggatagtttagcgagaagatttggtaattctaaagagatgatgaaatcagtggttgatgcaatacaaagaaatccaaatccacaaaatatacttacaaactccatagaagcggctcgagaagtgggacattgtcagtacgagtaccaaaccagctggggaaacaccgtataattcacttttcagtttaaccaaataatattatattgtttcgaaaaattctataatattgaaagttatgcagatcggctggttatatgattcagtggcggaagatttaaacacgagtatcggaatacattcgagaggttggactagctcatacatttctccggatacacctgcatttcttggatctatgccggcaggagtacccgaggcgttactccagcagcgtcgatgggcgacaggatggatcgaaatccttttcaacaagcaaagtccgttgcgaggattgtttagcaagaaaataagattccgacaacgattagcttatctttgcattatcacctgtctaaggtcaatccctgagcttatttattgtctccttcctgcttattgcctactccacaactctaccttattccccaaggtgactctctctctgacactcataataaggtttaaagttctgttttggtttaaatgaagttcaatttactttcataaaattaattttgaaggaaatttttaatgttttattattattatttgtgtgtgtgtatgtagggactttatttaggcataactgtcacacttgttgggatacattgtctctatactctatgggaatttatgagccttggttattccgtacaatcgtggctagtctcccaatcagtttggagaatagtagccactagtagttggttatttagcatctttgatatcacactcaagcttcttggcatctcggaaacggtgttcataatcactaaaaagactgtggctgggaccaagtcagcattagggtctggaccctctcaaggagaagacgttggtccaaactcagacttgtttaaatttgaatttgatggctcactttgtttcttgcctggcacatttattgtgttggtgaatatagccgctctagctgttttttctgtgggtctacaacggtcgagttacagccatgaaggaggtggttcgggtctggcagaggcttgcggatgtgttttggtaatgatgttgttccttccatttctaatgggtttgtttaagaaaggaaaatatggaaccccattgtctactctctctatagctggctttttagcagttttatttgttgttttctctgtttgaatgtagtatggtgatatgtgtttgttgtgttactacgctaagtttaccatgacattgtcttaattaataattctatatatgtaactttattttgcgtgcaaaatgtttgcccaaaactataattaactaatgtgaattgaagcagttttaagttgtgaattagaaagaaagaaagagtgattctcaaaaaaaatactgttaaacttgcaagctattaaatgagaaaaatggagatccaatttataagtgtgaaccatgtagtcctaggttcgagttgtatgactacagtctacaagactaaactaaattgttttaatgcccggtcagaaagaaaaaaaagttaggatcttgcaatttaaaatgtttaagtcatatatagaaaacaaaacatgtaaattagtgtgtagtcattaccttaactcaaaacaataatgacgaagttcaaccttcttggcgtctctatcataaccggttaaactattgatttcactactccctctttccgtttgataagatgttttagaataattcgcagagattaaaaaataattatttgttttgttgaaaagtgtggtttaattatctggattatggttgatgctgagaaaaaattattctataagattaactatactatttcacacatgcggactatgccactagctattggtgttaaatgcttagaacgatataaattgttttttaattatcaacaccaaattaaacatgaaatatatatcattgctttaaaacaagaacacaagctactcactatcatgtccttcagaatccagctattacgttaagagtatgtctcttaacgtaatccacttattacgtaattcacttattaagtagcgctatgtctcttaacgtaatccacttattacagtagcggtatgtctcttaacgtattccacttattacgtaattcacttattccagtagcggtatgtctattaacttagctgtatgcatgtctcttaacgtaatccacgtataacgtgttacttcatccacaagaaacaaagactttgacatttagggtttcttgttctcgggatcagtcatgaagctggagcttccttcttatagggaacattaacccttaccatgcgtataaagcttaaatctttgttagaagcactatatatacaagcattcatagacataataacgtacattaagccctttagaaacatattcaaaaatcgcaagaaagctcctcccatggcagattcaagctgttctctccctcctctttatgaaaacatttcatacaaaagttatattctaagagctgtggatctcacgattcttggccttctcttttctcttctcttgcaccgaatcctatatatgagccaaaacggcatcatttggctcgtggctttcctttgtgaatcttgtttctcattcgtgtggctccttagtacctgcacaaaatggagtcctgctgaaactaaaccctatccagatagacttgatgaaaggtaccattttcatttaaacagaaatcatgtgtatacacaaatattaaatattatttttattaatacatgaaaagcaatattcttaataaatttgtataaagtcttaactagctgctacctagatcttaatttaattctaaagacgtattattcatttccatgttatctttctatttatttgagctgaccttgaaatttcagggtttatgatcttccctcagtagatatgttcgtgcccaccgcagatccagttcgagaaccgccaattatggttgtgaataccgtactttcgctgttagcagtgaattatccagcgaataaacttgcttgttatgtatcggatgatggatgctcacctctcacttacttttctctcaaggaagcttctaagttcgccaagatttgggttcccttctgcaaaaaatataaccttaaagttagagctccttttcggtatttcttaaacccttttgccgcaacagagggttctgaattcagtagagattgggaaatgactaaggtaatgaatttgattgtttattttgcgattgtgtttgtctttagatttacaaatttttttaatcagttttttttttaattataaatacggaaggtaattatatataaaaggaaatttggttaaaaaaaagaagcaattagttttttttttggtggtaaaaacaattagttgaaattgtgtttttgtattaatttaaagagggagtacgagaagttatgccggaaagtggaagatgccaccggagattctcatttgttgggcacagacaatgaattggaagctttttcaaacacaaaaccaaatgatcattcaactataatcaaggtatttctacaattcataataagggttaattaaaacaattacatgaaatcttgttaatgtgaaggtggtatgggagaacaaaggaggtgtaggagacgagaaagaggtccctcatatcgtatacatttcaagagaaaaaagaccaaactaccttcatcattacaaagctggagccatgaactttctggtcagtgaattttgtagtcagaccatcacaagattggttgagatcacagattagttttttatgaagcacacatttgatcattatggtttagattcgtatatatttaaatccatcaataacataacttaaattagtaaaaaatttacctttgattttttttttttaaatttgttgtactacgtatcttatggtttttttttccaacaaatcatatcttatgaattatgatcactaaaccaatgagaattgatatatcataaatgagaagccatatcgaactatatcaatgaatgtcgttttactttttcttttgcatcgttatattaaatatctgatggagtgtgagatgaactgaacaggcaagagtgtcagggttgatgacaaatgcaccatacatgttgaacgtggactgcgacatgtatgcaaacgaagcagatgtggtgcgacaagcaatgtgtatatttctgcaaaaatcacaaaatcaaaaccattgtgcttttgttcaattccctcaagagttctatgattctaacaccatcaaactcaccgtcataaaatcagtaagatttctcctttttaaatttttgtttataatgatcgatcggttcaatatgttatttatcgttcaatacttaaatctttctttctttttattttctttgttaaaattagtatatgggacgaggaattgcaggaatccaaggaccaataaatgttggttcaggttgcttccacagtagaagagttatgtacggtttatcgccggacgaattagaagacaatggaagtctttcttcggttgctacaagtaagtattttaaacatttcaattgtatattaaaaccatgttctcatgttatctgattttaaactatatatattcatctaacatacaattcataataattttgttgttatgtagtgtattactatatatttgagttatttcattattcaccgttgctgttgctatttatttcaggggagcttttggctgaggatagtttgtcaagtggatttgggaattcaaaagagatggtgacatcggttgttgaggcattacaaagaaaaccaaatccccaaaatatacttacaaactccatagaagcggctcaagaagtgggacattgtgactacgagtcccaaaccagctggggcaaaaccgtacgtagattttaaatctcttacatctttgatattttacaaaatagctggacctttaccatataaatcatgcagattggttggttatacgattcaatgtcagaagatatgaacactagtatcggaatccactcgagaggttggactagctcatacattgctccggatccacctgcgtttcttggatctatgccgccgggaggactggaggcaatgatccagcaacggcgatgggcaacaggatcgatcgaagttcttttcaacaaacaaagtccgttgctaggattgttttgcagaaaattaagatttcgacagcgagtagcttatctttgcgtttccatttgtgtaaggtcaatccctgagctcatttattgtctcttgcctgcatattgcctactccacaactctgccttatttcccaaggtaactctctctttctctgtcattcatactaaatatcatattgttctatttgtcatcatatatatgaaaaatttagaaggagatttcaattttgatctttgatactttttccttgtggatttagggactttgtcttggcataacaatgttacttgcggggatgcactgtctctacactctatgggaatttatgtgtcttggtcattccatacaatcgtggtatgtctcacagtcattttggagaatagtagccactagtagttggttatttagcatctttgatattatactcaagcttcttggactctcgaaaaacgtgttcttagtatctaaaaagactatgcccgtcgaaaccatgtcaggatctgggattggaccatctcaaagagaagatgatggtccgaactcaggtaaaactgaatttgacggctcactttatttcttgcccggcacatttattgtcttggtgaatctagccgcccttgttggggttttcgtgggtctacaacggtcaagttatagtcatggaggaggtggttcgggtttgggagaagcttgtgcatgtattttggtggttatgttgttctttccattcctaaagggtttgtttgcgaaaggaaaatatggaatcccattgtctactctctcaaaagctggctttttagcagtttcatttgttgttttctctgtaggaaactagtatagtgatattgttttgttatatatgtaaagaagttaacttcattattaaacacatcaatttgaatacaatcaaacattctcgtaagtcatcaatcatcatgcatataaaaacatgaataagaacacacaaacaaccgactacctgtatgtttctgtgtgacttttgtctctgtctgtttcttttggttagtttcatttcctacagcatcagcatcatcctcgtaatctaggggaaaatatcataaaagaacattaagataaaactttacttgccattctttagacattagagagaaaacttagaaatttaatgcattggatagacaataacaatcgccagcttaaacaataagagacatattcatctgcgtacaattattaaattggttaactaaaccgggtttggtattgctgccaagggcgcctaaaccaacaccaagatttagagcgaagcgaagtgaagtgaaagaagagttttgaactcttgagtttcttctgcagtgaatcatgaacatgtcttcttcttctcgcaaactctcgcgactcttcaacattgtaactcagaatcagaaatctccagttttgctttcttctgaccaagaagcagccagaagaatcacggcgtgcctggtggagaaatccaccatcggaaaacttcaatcgaatccatcactcctcttcaatttgaattcaaatgttacccgtctcgttctatctgagccaactcttcccactcaatcctgcatcgatttcttcaagcttcttcgcgaattcgaatctaatctcaaacctgatctcacggcggtagtgactttatctcaccggttatattctaaccggaggttcaatgagatgagatcgcttctgaattcagttgttaacgacgggttttacaagcgtccggttgaggagttaggatcagcgatggtggattgtgacatttctgaagaaaagtttgaatttttcgaaaagtttttcgatttggtatttagggtgtatgttgataacggaatgtttgaagagggtttaagggtttttgattacatggttaaaaagggattgagtattgatgaaagatcctgcattgtgtttttggttgcggcgaagaagcgacggagaattgatctctgtttggaaattttccggcgaatggttgattctggagtgaagataactgtttattcattgacgattgtggttgaaggattatgtagaagaggtgaagttgagaagagtaagaagctgattaaggagttttctgttaaagggattaaacctgaagcttatacttacaacactattatcaatgcttatgttaaacagagagatttctcgggtgtggaaggggttttgaaggtgatgaagaaggatggtgtggtgtataacaaggttacgtatacgcttttgatggaattgagtgttaagaatgggaaaatgagtgatgcggagaagctgttcgatgaaatgcgtgagagaggaatagaatctgatgttcatgtgtatacttctttgataagttggaattgtagaaagggaaatatgaaaagagcgtttttgttgtttgatgaattgacagagaagggactttcgccgagtagttatacctacggggcgcttattgacggggtgtgtaaggtaggggaaatgggtgcagctgagatattgatgaacgagatgcaaagtaaaggagttaatatcactcaggtggtgtttaatacgttgattgatgggtattgcaggaaagggatggttgatgaagcatcaatgatttatgatgtgatggagcagaaagggtttcaagctgatgttttcacttgtaatacgattgctagctgtttcaatagattgaaaaggtatgatgaggcaaaacaatggctgttcaggatgatggagggtggtgtgaagcttagcacggttagttatactaatttgatcgatgtttactgcaaagaagggaacgttgaagaggcaaagaggctatttgtggagatgagcagcaagggagtacagcccaacgctatcacgtacaatgtgatgatctacgcttactgcaagcaagggaaaataaaagaagcacgtaaactaagggccaacatggaagcaaatgggatggatccggattcatatacctacacgtcgctcatacacggggaatgtattgctgataatgtggatgaagcaatgaggctctttagcgagatggggttgaagggtttggaccagaattctgttacgtacacggtgatgatctcgggtttgtccaaagctggaaaatcagacgaagcctttggattgtacgatgagatgaaaaggaaagggtatacaatagataataaggtttatactgcactcattggaagtatgcattcacctgagacttaaaacatattcgtcaaacaaagacctgtatgagctggtaacccctgaaatctctacctgttaatggttaaaatcggttacttgaacagaaccatttattttctgaaagattctttgagctagttgggacagggtatgtatcaaactttgctggagtatgatcatttggtatccacaatggatcaatcaagccaccattgatgtctacgcggtaaagaaaacaaagctcgacgcttttggtgtattaaattactataaatttgtctgttcatagaacaaagcttttcgaatgtaggtgtgtataaactgatattgaaggagttttctagaaccctgtgaatcaaatctaaggattgagatgttgattctgtgtatatgagccagacatttatgaagcttatgaagtactagatgttgatatctgatgaacttttattctttcaaaaagccagtgacgatgagggtaccattcttcagaaatacgaacagaatcacaactcataatcgaggccagctccatatttccaggcctcgagacatctcttccactcgaacctcgtctttgagggaagtccttccaaagacggcctgagaatacacaaaaatatcaagaaagttcaagaaacacgacatccataatgtggcagagtcatggcaacagaagcaacaatccatacataatttcttaaagagattcagaaatgtttcaccttagcaatggatcgatgtatgccgagaggagcgtatacaagcccagcatgaaaaaatgaacagaccaatcaagcagaacaggtatcccaacctgaggagaatcaccaaagaaacgaagatttcatgaataaaccaagaacattttcaatcttttgtttccgttttctggttcaaaaatgatgcaacgattatcaaaggagagctatacctgtctgaatattgacggaattatctgaggtttggtcagcatgacaaggcctaatgtctttgctagaggaccaaactgtattatatcctgaagaaatggtctgagaactggatcgcccaatctctacaagagaaatatgaaaccattacttagaagccaaagttcgaaactctcatttcccggtttagaaaagtgtactatacctgcatgcaactgaaatttacatggagaagctcattggtgaagccacgggaaacatcgagctgttgctttgcagacattgctctttgaaacagccatgatgcgctcaagtttggctgtcgttcaaaagccaaatggattcagtgaagttaatagcagggagaaagatatttagctgagaaccacaaagctatattaccatataaggatttagctttgataagctgtcagagtccagaagatctccatctattgcgtcatagattccttttttaagttgaacaataagattgtcagaaaatctgaatattctgaaagagttcatgatataaaaagttgtataatgttcaatgagatatggagacagcaagtgtactctcagagagtgagtgtatataccattggacaatcttccaaggtgtctggtcaaacttccaaaacccccaaatgaaacaggtgattgaataccgctagcatcaccaaactgagtaaaaaatttgtaagtaactttgattatttagtttatcaaattatcaatccgcaaacttatcttggaagcttatatataaatgaaccaaaccaacctgtagaacacgatcaaatgcagctggcaacggactggtgacaagtccaatccaacagggttagatatgtcagaatgcagcagtattattgtacgaaactggtaaacagaattataatatcaatgatagaatttcaaacttccagagatgatagatatagagatacaggcatcaacggagtttcttgtcaaagtcgtacctatttcggtatgtaggaaagattccgtatacaactctcagtatttccaattcatcaagagagactccctttgccaaaagacatcaggaaaagaaagaaaaaacgaaagttgatgaaagattgtgatataagatggaaggaaactcacttggtattttggcatcagtttccagtattcttcgagtaaatcctctaaactcggagatgttgattgcggttcagtgtaagtgaacatgtaagtagtgcggtctaatggaccagagccagccgggaaagccttaaagcaacaataagcatccttatattaaaaccatttctttgtggttatgggaattgtgttagaatggggacagatttttttacctcccaaaagagttgtacattggaatctgcaactctggtcaccgatgaactgctatatataacgtcgcttgatgagttctctttaaacccatgagcacaagatccaacaacaaggcacattccatctggctttctaccacgtttgatcttttgtagcagaatacataacaagaaaagtattatgcaagggcaatacacaatttgctcaagaaaagcgaatcagtaagttttatttttttaccaccataactaatgcaaatgaaaatgtaaaagtagatatgttcttaggccaagatatgacctgcttcagaataggagaaaagtttcccatggcatcaataacgagacgggaagataatgtgtcacctttagaaagttgcataacctgtcaatcaaaatgttcaaacaattcatatcaataagctgaatactcttcttaggtacaatgtttttggagaaaacgccagataactcacagctaaatcattgtagatgacgatgctcgagaggctggagtcttctaaaatgactccaccaagagaaatgaaacgttgttttacagtttccacaagtttggctgggctgttttaacatacaaaacgaaaaaacaaacaaatcatcactttcagaaagtagcagaacacaaggggattattcttttcctatgtattagagaataagagaagacaggactcacgaaacgccgaggttaagaatatcttcaacccatatatcaccaagattctcaaatccacatctgttctgcatttgttcaagataaccttaagctacatgacttttataaagcatcaagatattgcttactgaagagaagctttaccggattgaactttgcagcaattacttcttcgatctcatcttcggttaaaactctgacttcagtcagttctttcatctcttttcttgagatattccattcttgatctctctaaatcaccacaaaaccaaaaagctttaacaatagcttctccaaccagacctcaaccacagcattaactagaagctttacccctttgattgcatttctctccaccacagcgactcttaaacccttggcacatagagccgtggctagaaaaatccccaaagtacccccacaaaccactatgtcaaaggttccaacgagattattccccatactataatcttgagaaaaaccagataccctagaaacaatttgctgagtttcttgtggtcctgcaaagactaacattcatcaccaagagaagcatatttcttaattatctgaatggttaccaaaagactattgttcttattacctgttggttgagtacatatgttggaccaaatattgtcaagtctcttcaaggcattataagagtaagcaccaccagcacctccagcttctccaccaactgaaatactctccattatcttctgcatatcgaaatgattgaactcatactcagctaaaaacaactcatcgtgaagttaaacatgcttatgcaatctcgcttaaaggctctcaagattcaaatactaaaacaactaagaaagaacaaaagcgatgaaaatttcttttcctgtgcaatgaaaatcaattatcagttatcaagagcaaactttcatcacaatgcagaccacaaaatcatctctaatcctgataaagttcacaactttttctcatttccccccagaggatgcgtaattgagcagaaagcttgacctgtgtaagagagggagccaattgtgtttgaacgcacactgtcgtcgaagctctccttcttccttggtttgtctgagcccttgatacggaactaacgaacccattgaactgatgaatttgcagaaccaccatgacaatgagttccaaaacaaatgctataaaaccaagagcgaacttttgataaacagagataaaacttgtgaagagaaaactggaaagattgtgcaatgtgtcagagaatgtgacacgtttacagtcttacaaaacaaaaacattttgggttacattaactcaaaacaaacttctgttctaaaattaaaacaaatctaaatgttagtatcgtttctgtaatatttattatatcctcttcttcttttttactgattcatcaaatcggggatcggataagcctgactgcttcagggtttaagggttactctcactcacacttccgctggtaagaaattcgatttcgatgcgtataatctgtcttccgcttttttttttggttttgaaatcgacaacctttttttgcggacttgttgggttaaattcgtatatcttcaattttgcgatgagttttcacttttccaatcgaaatagcaaatgggcattagctaatttcctgaattgtgagtttttgtgttacgctgtgtcattgattcatataagctattgcaaagagagtaaatgataaagccttcagctttacaatataattcacttttacacactagagtttagaaattcaccttctttctctgtttcaggagttacaagactttaacacatcacaaagaatttcgatatgtgttatttaaagttcattgtggatctcaggtttcacaagattggatagaagcagccatggcaagtctgataatgactacaccattcccaggttctgtcactgcatgtaagaagacaaataacctgtctgttcagagagcctttaaggtgacttgtatgcagacagagaaaccattagaggagctatacaatgttaaagtggaacggaaagtttcacagaaacggttggaggaactcggggtttcgagatggtcagtttggaagacagggaaatgcaaattgccatgggattggcaggtggatcagttggtttacattgaacaaggagaggttcgagtagttcccgaaggaagcaagaggtatatgcagtttttagctggagatcttgttcggtatccgaaatggttggaagctgatcttttctttaacgctccttatattgagcggtattgtttcaaggcctatggtgatgattgatccaacttagacttttgagtttttagtagagccaagaaactttacacttgttgtgtgttgttgtagcctgatggatctttttgtgataatataagaaaacaagttctctctcctttgttctgcattttcaatgctaatcataagtaaacataggcagcatcagagagagataaaaaaaaatcaaacataaagaaagaaactcaaatcaaaacatcatatttggacaaaaccccactatttcatcaactgaacaaaaaaaagaaagaaaaccaagccagatttgcctgaaaactaaatccgttttacttgtggcttaagcaataagcagagttatgattaggaagaactagagctgctctctcctgaacagccttggccagagtggctagaatctactgccgaaggaatgggtaacggtacctgaccagattcacctcaagtagaagcaccatcgccgccactgccagattctcctgaagtagagccgttgctggaatttttggggtgagagcaaaacagagtttgcctgttccagatcggaaagaccagagaggaaagacgtctttttccttaaacgaattcgacttgttagcatcaagcacatcgttccaacctttaacaaagacataattccagtttcccttcatcttccacttcctcaactcaagcgcatgcttattcatccgaggatccaccaaattcacaggcacaccatcgtcacgaatcttcatggcattttcatgtatgattcttgtctcgtcctctgtcaaaaagtccggagttttcacttggttaaaagggacttggagacgtgctttacctttatcgagatcagacttaaacaattccctcgttgagatcagcttcggattgtagccattctcgttcctcataacgttcaaaagccaatcgggtggagtcgtttgaatttggttgcacctctaaaggactaacgactttgcctttcttgggacgtctctcttccaccttaacagaacaacgttttttcttggactgactgacacaagatgacatagacgactgtgaatccggattagggttttctagtacggaagtaattgatctacgttctaagaggctgtcaagcggcaactctgcgacaacttcgtacatcaactcctgcatattaacccgccctgagttaaccctaggttccttctttttcgatttgtctttcttagtctcgtactctaacgacatgacgggcggattcaacagtttaaagcttttgtcttcgttagtaccgtactctttgtgcacatcccactgacgtctcgaaatttgttccacctcaaagcgaccaaaggtttggggcttctgaagaatttcacgtaatctcgtcaaacatctctgcttggaaaaactacgatcatcagatttcatcatcttgatcaagtctcttgaagatacagaaccggaaattataaaacctagaaggaaactcgagttctagcgaaagagaaaaaggttagctttgtagtcaaggaacgaaggtattcaggttttccttttcttcatagggaaattgattttattttgcgattaaattaatgagagtcggtgagattacaatttttacactcctgggctctaaattaagccgcctaataatttgttatccttaaaggacgaactacccttacccaacaaatgtaacatatgttttcgttactcaaaaaatttcacatgtaaagaaatacttgttctgtttcttatgtttccataataaaatgaagtagtcatgaatacgttgtttgatatggaagaaactaatttaatagtttcggctcttctgttataagatcatagtttaaatgtaaacagaacatgccataattctgtttttgagtaactttacttactcattgatcaatttacaaaaaaaaaatgaaacagaacaattttaatcctaagggtgtctgatgcctctaagcctattctgaccattattcttgatgaaccaccctggcttgtacaaagcaacaacatgtccaattgccaatccaaacaacacccctggtccataccctattgccgctgctctccactccaatatttcttcttcttcttcttcgggctcttgtgtcgatggtgcgtcttctcttaaacagctttcttcaagaggaagaccacataaccctgaatttccttcaaatgaggatttaggctgccctatgatttgtgttccttgtggtattttaccagtgagttgattatcagagacatctatgtacgctaaatacgatagtcttccgagttcttgtggaatttcccccgagagtttgttccctgacaagtccaatgactcgagctctgtcacattagcgaaagacatcggaatatgtccagtgaatgagttgtttgataagttgagagcaatcaatgttttcaaaagaccaatagattctggaatctctccttcaagcttgttgccagagaaatcaatggcggagtagaaagtaagaaccttgccttgctccatgtatagacctttgtattgcaaatccaaagtatcttcataaacaaaccgatcactcgaatagtctcccatatatagcctctcttcatcatacatcttgagagattttacactccaattcgcaaagtaattcgttggtaagcttcccgtaaatctgttatgcgatatttcaagtatctggagcttgggaaatgcaagagaactttgatcatctggtggagacataggaccatggaaactgtttgaacggagagtaaggactttcaaattgggcaatgccttgagccacaagggaaatgaatcattgattctgttgtgatccacactaagaaaccttatgaatgagcaattcaggagagatcttggaagttctccggttagttgattgtatccaacatcaagtgtctgcgtcaaagcaccgctataaaactcgtctggaatgtttccttccaacttgttcttccggagattcactatggtgaaattacccatacatggaggaattgagccagtgaagttgttgtaggacagatcaagaacatcaagagaggttctgttacagaccgagagaggaatgtctcctgtgaaactattgttccaagcagacaagttgatgatagagaccggtggattagggaatgatcctttgaaagagtttaaagcaatatctagtacttggaccgatgagttggctaaaacatgatccaatgaaccgttgaaaccggtgaatgaattgttactaagatccagagagactaaaagaggaagactccatatccaatcaggaacgtttcctttgattctgttgctggaaagatctaaataccataacttctttaaggactttaagaatctggggaattcactgatgttgcatccagacaagagcaagatctccatgttctttggaaagtcaatgtctgaatacacactcgttagtgttaaactgttgccgtgaagatcaaggtgtgtcaaagactggagaggagagaaaattgataagtcaattgggtggcttgtgtttaggaaagagaggcttagatacctgagattaactaacctcaaaacaggatctatgatctctgtttcaaaatggttattcccaagatttaagttctcaagtttagacgaagaattagagatttcaaatgagccagtgagatgattctcacttaaatcaagataagacaagaaaggcatggtgaaaaaagaagaaggtatggttccagagaattgattataagaaaggtctaaagctaaaagcttggttagattctgtacaagtgagggtaaatcaccggtgagcttgttgtggggaagatttaattgggtaagtttggttaggttacgtatagaagaaggaacttggccagtgaagccattagaggatagaagcaagacctctagattgttgagctgaccaaaagcagaggacaagggagaagaatcgaagttgttgaaagagaggtttaggtaacggagatgacttagctcaaagaggctactgtttggtctgagagtgccacgtaaacatccaccggggagttctagaaccgtgaccgcaccggtcgtgttatcgcagaccacaccgctaaagaagttggtgtcatttctgcagatgctagagaacgcaaactcgtttttgaaacgtttaatggtttcggtttggtctggacgacatcggagagcagcgatgcagtagaggatggacacgagagaaagtaaacgcaaacgcaaatttgacatttggatggataagtgtgaaaatttttagaatattgcaatggatattttgctttcgcatgtgaatcatcaattccttgtggctttgttatatagtcacacaagttgtaaagaatgacggctttcgcgtggcttgagttcttgaaactcaaaaaagtcatacaaaacaaaacttaagaaagaaaaaaaaagagacatgggcttatatttctttacgcggtccctggattcgagaattaaataatgtaatttctgtctttcttggtgtctttgttcagactaaattgtgatatagtgagcatagcaaatgaagtaatggaaatttgaatatagcattagcaggaacgtttccacataactagttgcatatttcaatgcaaagaaaagaaacatgttatttaagaatataacaagaggatgtatgagttatgtgggtaaaattgaagttttttgctattttggaaaactttactatttttatttaaatttaaagagataaatgatagggtaacgtactaacatgattttgtatcatgtggacatttaaattgtctttataggatgctacgaaaatttcacgtggcttgacttcttaaaactctcataagttttcatgacagattgcgtggcagtttttcttttcacttaaaaaaatgattttattataattcgatagaagaatacaaagatatgtgatacggttttggaccttttggtacacgatgaaagttatacttatattttgtactacacatattattaaaaaaaacttacatttctttcgatgacgtagcttgaatcatttaatttattttcctttttgatctttagtttcaactgaagtgttacacagtcagcgattgacattttttctggtcaacatatgatacattcccacgtacgtaactagttgcaaagggagtatatgccatacctttaaacatctcctcttgatggaaaaaaaaaaaaaacatctccccttagtcattaggtccattctatcttccacgattaatgactgatccttttaagaagattagttattcgattactttttgtataacttaattattgttcacctaatctcatataccggccctaatcttataacttaattattgttcacctaatcttacaagtatatataaagcaacttttttgttattcagtcgacttttagattgctaatttgtgagatagctgtgtagcttctctcttccaatgtacctcaaatcacaaacgttcattagaggtagaaacagtaatggtcaaatataaatgtatcaaccatgatcacagacctattggctaatggcatgcaatggtcaactattttttaacaccattttgacctccatctccatggttcatagattttgcttctatagaaacaaacaaaagatgaatagtactactatagttgacgcaaactattattttttttaataagaaacaaatccgcagatagagttcatactattagaaataatttggtcttagtcaaaatcataaattcaaactttaagcatccacactgctatatatggttacatataaacaaatagcgaaaaatttctgattgtttcatatttaacaaccttaaaattcatgaaccattattccgaaactggtacttttagaaaacagaaacattaaatagttaaagtaattaactagaattaaataacgcaattaatttttgaaaaaaaaacgttgatagaaaggagaaaaatggatcgcagcgtcgtccctatatctctcgctccctttcaatttctccttgtattttggatctttcttacttccgtacacacaaacccaaacaaacaacaaaaaactgttgtctctctctctctttggtggaattcaaaaaatcgaattcgtggttgcgtttggtttttcttccttcttcgggtcacgagaacaatgggacaacaaaatttgatctacagcttcgtcgctcgtggtacggtgattctcgtcgagtatacagaattcaaaggaaatttcactgccgtcgctgcacagtgtctccaaaagcttccttcttcgaataacaagtttacatacaattgcgacggacacacgttcaattacctcgtcgagaatggcttcagtgagtctcttcttctcgatctctatatatgattctctctaagctt

SEQ ID NO: 321 - DNA, 92612 bp, Arabidopsis thaliana
gaattctctaatcatttttcagtgctttttattaagttcaagaacccacatgtcgcgatttgattgtagccaattctgataagaacatgcattctagaattagagcaaatcaacaagtgtaaaattgtaaaatcatctctatatttgcaacagaaattacctaaatgtatctcataacgtttaaaatacaaactttatgataaaatgtacaaatgcgtcaacaaatgtgaaataatcaaataaaaataggtattgggagggtcacggtccacgttcaggttcacgtcttaattttacggcttattatacaaaaccataaccaaaatgttcttatctcactttcctttctattcccggatttgccgctttcttcttcttcatcatctctctctcaaaatcaccccttttaaagttgtttcctttatacgcaaaagtgaacgcagatcttaatgcagctactgtgatttcgattcttagggtaaatatattcttttactcattggattggcactcctcagcatctgggtttttgcaaaggtataatttttattgtctctttcgattggatttgattgatctgccgattctctgtttctcccgagctttgtgggttaagatctcgattatctatctgggaatctttagattttgtgttcatcggagctgttaatcgttggactcgctagtgttcttctcttgtaaaaactttgtggaggagaatctgattgtaggtatagtgtgaagtgagtttgagctgaattctgtagctttacatggaagtttttggttgatgataacgtcttgtactttgataccatatctgaccatagtcgccagattcttaatcggatctagttcgagttataagactcttcaatagtctctccttaggttcttatgtttttattgtgtgttgatctggtttctctgatcaaggattcagcttttagctccctttattggtcatataagaatagatctgtttgattggtttcttaactgagcaattgtgtagcagattaggtgcttatcattatctttgtttttgttctgtgtatttgaatatctcattaggatcttggcatctcctattgatcatgatatcttgttctccgaagtttgtttggttttgtaacagattttatgtttatgcagcattcttattacttccactgattcaaacatgtggaagtttaaaccttttgctcaaaaagaacctgcgggtctcgaaggtcgatttctcgagataggaaatctgaaagttcaagttagaaatgtcattgcggaaggaggtttctccagtgtttacttagctcaagatgtaaatcacgcgtcaaagcaatatgctttgaagcacatgatatgcaatgacgaggagtcacttgaactcgtaatgaaagagatctcggttctgaaatccctcaagggacatccaaatgttgtcacgctctacgcacatggtatcttggatatggggaggaataaaaaagaagctcttttggctatggatttttgtggtaaatctcttgtggatgtgcttgagaatagaggtgctggttactttgaagagaaacaagctcttacgatttttagagatgtgtgtaatgctgtctttgcaatgcattgtcaatccccacgcattgctcacaggtatacatgttgtattattagatttcgtttcgtttttacattagcaagcgatgtgaattgatactgtattggtgttgctaatcgtgacagagacttgaaggctgagaatcttctattgagctcagatggacaatggaaattgtgtgattttggaagcgtttcgacaaatcacaagatttttgaaagagcagaagagatgggaattgaagaagataatattagaaaatacacaacaccaacatatagagctcctgaggtttgactggatatgcacctatgcagattataagagttttaaaagtggtgaaaaaatgtttgatttatgtctttattggcaatagatgtgggatctctttcgaagggagatgataagcgagaaggtcgatatatgggtatgtgatgacactttttcaatctctccagattgctaatctatttggttgaaacttgaaagtaaaggtttgtttttaaaaaaaaataggctcttggatgtctcttgtttcggatatgctatttcaagaatgcatttgatggagaatcaaagctgcaaatcttaaacgggaattatcgtattccagaatcgcctaaatacagtgtatttattacggatctcatcaaagaaatgctccaagcttcacccgatgaacgaccagatattacacaggttaaaagtcaatttttactcattgtttcttctcagttgaggaaatgtaaaatgtctctaacaacatgtccatctacagatttggtttcgtgtcaatgagcagcttcctgctaatttacagaaatcattaccggatcgaccacctgaaatgcaatctactggagtccatgatggtatagtgaataaaacctattttggatagcttctcaaagaaagatgtgatttcttttgatccttatgaattttgacaggctcatcaaaatcagcaactaaaccttctccagcacctcgtagaagtccgccaccgccgccaccatcttctggagaatcagatagtggaggaccgctcggtgccttttgggcgactcagcatgctaaaacctcagttgtatcagaagataacaaaaacatgcctaaatttgatgaaccaaacagtaacacatctaaatctgaaagagttcgtgtggatagtcatcaacccaaaaaaccaagtcctgtgagaggagaggctcgtggtattcaaagaaataaagatcttgaaactacgatttctcagaagaatacaactcctgctgcagccaataacatgacaagagtgtccaaggatgatgccttcaactcgtttgttgctgactttgataccacaaagttcgataatggtaataaacctggcaaagaagaggcattggaagctgagatacagaggttaaaagacgagttgaagcaaacaaaatcagagaaggcagaaataactgctaagtttgaaaagctttctgctatctgcagatcgcaaaggcaagagttgcaggatctcaaacaaacacttgcctctaaaagtgcctcaccgtcaccgagcagagactcttcacaaaatcaaccctctccagggatgcattccatgtcatcaactccatcggtattattcttggttcttgttcatctaagcttagacacccatacaaaagtcttcatcaatgtatatcttagaattctaatgttcttgatgaaacagagagataagatggaaggaacaatgtgggaacttcaacaggacagatctaactggtcaactggcagctctgatacaaattcatggcaaccttttagtgatgaagcgaaacccgtgatggaatctgcatcaaagggtaacaataatacgattaatcagtctgtgagaaccagaagtaaaccagcttctgctgcaggtactcaaggttttgagccatggggtttcgagacagaatcctttagagccgctgcaacgtctgcagctgctacttctgcatctggaacacaaagatctatgggctctggaaacagcacttcacagagatatgggaactcaaagatgagagaaaaccagaaaacagctcaacctgctggatgggccggcttctaaaactcactcagatgcgcattgctatttcttcctcatgcaacaacaacagcttcatgttgctgccattacagaatcttgaatctttttgtagatgatgatcatcccctgtttttgtgctgctgctaaatataccccacccatatccattatgttttatgtagagtcttaaactttacacattctctgagctgtggccagatatctcagcttatggattattattggaaaaataaataattcaagattcagacagcttacacttctttctgtgaaacttagaactaaggtcacatttaataccgaacccaaccatacgatggctgcattatggtttaaatgttacccaaaaagatttcagccgtaactaaatcagcattttaaaatcctggattaattttcgttaatgtaaatctcacattgaaccggacccgagtagaaaaaagtaaaaaaccgaaccaaaacattaaataccgagccctagtttagttagttagaaggaacttaaaaagagttcgtgtcctgaaaatcaaagaaaaagctaccaaattttgaatcgttgtctttaacttgattttccccaaatttctcagaaatcaaaatccgccggaacaatgtctactcccgatcccaatcccaatccaaatccaaatccttccgtctctgtagcagtatcgactccaatcgtcaccgcatctgaatctccggtgacacaacctaacacagtcataacgccgtcgtctcaacctcaacctcaaacaccagcttcgtcgtacagagccatagctccgcttcatcgtcatcatcctcatcaaaatatctacactaaccctttaccgattaggcgttcgaattccgttactaattcgcctcatcagcctcctcacccagacccgtctagtctgatatacccgtttggttcttcgggtcgagggtttccgacccgacccgttagacagaattccaattccgtcgctgatccagttggtagtcctagtccaggtgggtatactcctcgagggccagtttacggataccaccatggccaattcgtgtcgaatttggatccaatgaatcagttcatgagagctgcacatcctcagaatcaacaatctcctcaacttggttccggtcatatgaaaggagttcctcattttttgcaacctcgggttagttatcgttttcgttaccaaaacaagtttgaatctttttgtttaattccatagttttgtcaagtgttttttttgtagcttgtgctagttagtgaaaatgtgtatgttgaagtgaagattatttgctttggtgattgtagaattcgaatagcaatctctaatgaattaggaaaggttgaaacttctgttagatatttgtgtgaggttacattttgtaaattttggatttttgattgttaggctactccttctccaacttcaattctagacaacagtgggcataagaaggccaggtactttatcttctttgccattatgctttgttaattagaaactactctagaaacttaataatgtctctgtttcgtttccatggtgtttaggagccgggatgatgctctggtcctcgttagaaaaagaaaggtatagttttatccttgttttttggttttgcattatcgttcgaaaccgcttgcttcgccatttgaggaattttaaatactttttatttgttctgcaggttagaataaccgagggagcttctttatactcgctgtgtcgatcttggttgagaaatggtgctcatgagggaattaaggttcgtatccatttcttatttctgctttgtagtataatgcaacacttggatttttgtatatctattcttgatatctttggaagattaatgacgttgtttacagccgcagcgaattgatatgatgacatgtttgccaaagcctttacctgtggacaagacggagacaagtttgccaaaagatttagttgaagaagcaatttgcgaagaagacaaagaggtttcgtgtttctctgatttctttctaaaatggtaattgtgaagggtaaagctaagtttgattatttacttcaactctcttgatgagcttcaggacgaggaatctgtgaaacatttgtcagaatctgatcttttgaaaagacatatagaccgagctaagaaggtccgcgctcggtgagtcccacaacatatcatcaaagctaagttcgatggttgaagattgaatattttttgttttgaacaaaattgtgtggtttgttttgtttgcagattgagagaagaacggttaaagagaatcgcgaggtacaaggcaagattggctcttcttctgccaccctttggagagcaatgcaggaacgagtaatgattttaaagttagggacttcggtgtgaatatacttgcagttgatttagaaatgacataaattatcttagagccagagttatgtcttatgtctgtgtgtaatataagaaagattttctctgaattttcgtcatacactcgtattagatgattctaaactaatcaacaatctcaagattttctgagatggttaacttatatagctcttatcttttttttttttcaagaacacctagtagttcttggacaagtaaaattttcaatatagtattcggtcatggtgggtcgaccatgttttgaacgctggatcgatcatcatgtggtcggacgatcataatttcagagattgatcgaccatccttggaagcacgaacacatttagtcatgtgtttgaattttcttttatcttatttgtttccaactcccaaatgatacgaaatgtcacaaaaactcttaaaatcactacataatctaagacttcctaagacacaaatactcctatggacattaaaacaagattttatcaacagtgaagccatattatcatcactgtagttctgaaaatgccatattgcccaaagtcttttctagctagtatgccatagtggctaacatcttcttctttcttttcatctctctaaataagcaaaaaattgagaggctttctcttcctcttctattcctctccaacatagtattcattctctcctcatctcatctcttgtttcttttcagccggagcttgtgccgatggttctacgtcgatctcactctctcaacgacgaagaaaacatcccccaaagcctccttctatgtccaaatgtaaagcttctccgcagcacacaaccttccaccgctgtaccaccaccgttcctacttttctgacatggaactgaagctttatcaagttttatgttaagtaatgttaatcggaagtcctttaggcaagatgtctagctaaatgttatagaaattctagggtgacaatttttgttttcaggcagacaatggtaactagtaactggacaaattaatttgaagtatacaaattattatggacaatatttttctaatatttgtagacaatttttattacatataagatcaattactcaaattttgttttaaaatatattttttcgaacgaaatatgattttaggatgaaacaagaggccatatagtacgacgaacatgacccatccacaagcttaatttgttcttgttttccaactcactcttttctaatttgaagattaatgcttactgacctttaagattaagatgttgtagttttgtttttcaagttttcaccgtttaaaatacacaaataccaaaagtctttagttacactttgttatgtaacaaaaaacattgctggcatagtggcatattgacaaaccttccaaaatttgatttatctgtttgaaatatcacagttaaaaaaacaaacccaaaaaaaagagatgtttatgacaaatgaactccatgaatatgtattattccctggcatatgtaacaacataactttattaaccaactcttgtctcattataaatttctgaaacaatgtatacaataattactcactaattcttgtagcaaattaaacccaaaaatagttaagaagaaaattaacaaaaaaaaatatggttgcatacgagaagagtcctattgtttttctatttgctacaatgatgcttgtaatgtttttgttttgtggaagtggagaagcaagaacattagggtacggatctattaaaggagaccgaattccggcatgtggctataaaaaccccaattcatgtgtcaaacaaccagttaaccattaccatagaggttgtgaaaaaattaccaggtgtgctcgtgatgctgctcgttatactgaatccttcaatgtcgatgacgatgaaagtcccattattaatctccattgaaatttaatctttaatttactttcgttgatactacaaagattcatgtatttatacgtcgtgtagcttgaatatattcatatacctaattatcagtctattaaaatgtgaaagattatattttattaatttgtgtttttatgtaaagtcactaattgttgtcttaaatttttatgtattctatgcttttcctgagattatttatttatttgtttataatttttttttaattaaaaaataaattatgtgtgactactctttctctagatatgccttaagcaataaaagggggaaaaacattttttgatgacaaattagtttgtcatatgaatgaaattgtggtttagatgaatttcatccaagaattcttaatagaaccgaaaatctctttaagttttaacataatcaacaaagataaattctatgaacattcctaatatttcctttaagattactcaatgaattcttgtccgagcgcttgcatttgtctaatcatcaacatagacgaatcatacatttgcttgcggctaacgtcaccttcctttcctccttcctcttcgaagagcctaccatccaatatactcagcacatagacaaaaatctatatgagttacaaaaattcatccattgagttgttacaatttaatttgattgaaaattgttcattagacattaggtgaggaatgcaatgttgtgtgagttaaatttaagttactactgctactattgattcaagtccgtcatacaaaattctagagaaaattaatatatatatcctctcgttttcccatatcttaaaattgttaaattgaaatccagagggtaagtgagagaagcaatcgacctcagcaagaggtgtagtattcataaaagttttacgttgtatatttaatgacactacaaagtcattggaaaatatatttttgtaaggtatattcttatagattcttttaaatgtacttttcgtttctagagttctctgaagactttagttccacttcagcgtttcaacagttcaaagtttccacctcatgcatgtgttatgtgtacatatttcttctatacatccttttttttcagtgaactatatgttataaaacagtaactctatagttaagtgtaaactggttggtttaagaataaactaaatattttttattaaattgtagtaaattgattagtttaagatagaaaccaaaaccaagcttaataaagttagattgattcctaacgttagaaaaaaaaagttagattgattcctcacgtttcaaaaggggatcgttggttcttggcctcacacatacttttccttgactctttcaaaaaagacaacctttgacaaatcgcttataaactgcatttaattttacatagataactgcactcactgtcacatgcatgttcacaatatcttgactatataataattacatttataaaatactagcctatgtgatcaaaaattgttgtatcaagattttctctcaggtgactgaacaacagagaaaaacatggcgaaaaaaggaaaagaagtgttgaacgctttggacgcagccaaaacgcagatgtaccatttcacagcgattgtaatcgcgggtatgggttttttcactgatgcttacgatctatttagcatctccctcgtcacgaagctcctaggccgcatatactaccacgttgatagctccaagaagcctggaacgctccctcctaatgttgctgccgctgttaatggtgtggccttctgcggtaccttagcaggccagctcttcttcggttggctcggtgacaagctcggccgcaagaaagtttacggtaacctttgctaatttcttggccttaacatatgttttagtagttttacgtttaaaatgatctatctagattaattcaaagtatttgatccattggtaatactagaactattaattatagtatttagtggctaaattaactaatggtatataatgaaaattattggaatacacataggtattaccttgatgctcatggtactatgttctctcgggtctggtctatcatttggtcactcagctaacggagtaatggccacactttgtttcttccggttctggctcggtttcggcataggcggcgactaccctctctcagccaccatcatgtcggaatacgccaacaagaaaacacgtggcgccttcatagcagccgtcttcgctatgcaaggcttcggaatcttagccggaggaatcgtgtctctcatcgtctcgagtacatttgaccatgccttcaaagcgcccacctacgaggttgatcctgttggctccactgttcctcaagcggattacgtgtggcggattgtgctcatgtttggagctatcccagctttacttacttattattggcggatgaaaatgccggaaactgctcggtataccgctcttgtagctcggaataccaaacaagccgcctccgatatgtctaaggtacacgttccttaactaatacttaatttcatcatatactaaatcatcatactaaaccatgatgattagtgtaaaagtaattattatttacacaacaggtgcttcaagtggatctaattgcagaagaagaagcacaatcaaattcaaattcatcaaaccctaatttcaccttcggtttattcaccagagaattcgctcgccgtcacggtctccaccttctcggcacaaccaccacatggttcctcctagacatcgcctattacagcagcaacctcttccaaaaagacatctacacagcaatcggatggattcccgccgccgaaacaatgaacgcaatccacgaagtcttcaccgtctcaaaagctcaaaccctaatcgctctctgcggcaccgtccctggttactggttcaccgtcgcattcatcgatatactcggtcgattcttcatccagttgatgggatttatcttcatgacgatctttatgttcgctttagcgattccttatgatcattggagacatagagagaatcgaattggttttttgattatgtattcgttgactatgttcttcgctaattttggacctaatgcgacgacgtttgttgttcctgctgagatatttccggcgaggttgagatcgacttgtcatgggatatcggcggcgagtggtaaggcgggagcgattgttggagcgtttgggtttctttacgcggcgcagagttcggattcggagaagactgatgctggttatcctcctgggattggtgttaggaattcgttgttgatgcttgcttgtgttaatttcttggggattgtttttactctgttggttccggagtctaaagggaagtctttggaagagatttcgagagaagatgaggaacaaagcggcggagatacggtggtggagatgactgtggcaaattccggtagaaaagtcccggtttgattattttgtgttactcattttgtaaatttactctatatatgaaagtcccttgcataaagtttttcgatactcaatatatcagaataacagttttgctggaactttgcaaccaaattactctgtgaattggaaagtattatcttacttcttcctataaagcaccagtgatctttttgtaaagagattcataagtctattggtttatggaacaatgccttcacatgcaagtcatattatttgtccagacgacgaagaggaagaatttgttgaactagaaagcagtggcgatagaatcgttcattaagataaatggttcgtataaaaccattaggataaattctatgttttgtgtttcatcattgaatatctaccagaccaaatgattttatttggttttagtttcttttgtaaatcccaaaaaaggtaaagttatatcaaaaccaaactacaaaccagatgttaatccctattgtattaaccacaaacatgttaccagaatatatcaaaagtgtatcagtttcagtttgctactaagtaaagactttcatctttgtgttgcttaggcttcaagttcgttttatcttgtcttctctgttttactctgctttatgatgatgataaataacgatggaacacaagagagaagagctccattatgcacaagaattcatttccataatatagttgcttgtcatgtcgttcaaatcaaactccattttcatgaatttgcataaacaaaagaaaaacacacattccacttgaaacaacacaccgagagattatgaaaatccttatataatatattcacaactcattaactcataacattgtttgcttctaagtaatggaatttaagtggcatgctactctactctagtttactaaacgaatagaaaaccaaaactttcaagtcacgatcctactaatttccatcccttgtcttccgcagattctctgatgacactactcattgttgttgatttctaatggtctgcctccaatggtggagaagtgctaatgcagcattgcatatctttctatctttgtgctttgtgagacgctcaagcttttccatgatccgtcttgtttcaatagccgttgagatgatggaaaatttcatgagtaaagcgagtatgtcgacgcatattgatgcctcttctttagctgcgagaaatcccttggcattggcaacatctgctgacttcttggccatctcgaatagctccaacatctccggtgagttcttcttcaacacaagacaagttttagggttttcaaatgctttcaccggttgatgcttcttcatgttgagaggaggccttgatggaacagacttgcagcaaaagtcaggcttcctcaaaattttcttaatcactcccgtttcacccgccccggatctagggtttttagaaccttgaattggtgaggccgattgcttcttcttctcgatagtcctcatcaatgcaaaagacttggaatcaccaatttgtttcatctctctggtttcatgaaccctagatctctcatcttcgttcttcttcatccccaaaaaaacagtctctttcttagccttaagtaccgcaaaaccatgagatagttgctcttcgttcttcttcttcaactccgaacacgctttaacaactttcttcagtttcaggggattaggtttgttgcaagtagaagaagagttttgtccgctggagtaaaaagtcttcatccatgaagtgaacaagacgtgagcttccgttcgtatcttagggttttcgtgatctctcagactctccaagggaagtatcactttggaatgggaaagatttttgacagagagattcaaacccttcaagtatcgaagaacatcaaagcaacgttcaacatcagaagcattctgcgaattagaagctctaattgcagtagataccaaacgaggaagatctgttctctctgttgctatcgcaatcttcatcaccatcttcttcttcttcttcttcttcttcttcttcttcaagtgttgatcgttagggttaaaaaatcagaactttggatatcacaaaataggaagttagagaggtattggatattatatagaacgtactagaaactttagagaaaaggaaatagaaggaagtttacttttgagccaaggaaactttatccaaaacaaaatcataatctgaccaggatattgcaataaggatacacacatagatcttgttgttgcttcattaattgcgttattctcaagttacagctgtgaaattaatttattatttgctgttgttaagtttaattttatttttgggctatgttgcacttttataaacgtttggggatattttaacatttagtagaaatagatatgggtatcgtcttcgagttcgagatacacgctaaaaggaaaatctgtggactttgatgagcttttacttcaatggcagagtcaattcgaactttttcgcttcaatggcggatactgtcactgatcatcgctttacttgtgtactttccgattctgtcgggaagttactttaaaccgttcaatgtgagctacgatcaccgggctttaatcatcgccggcaagaggcgcatgctcgtctcagctggaattcactaccctcgagccactcctgaggtaacaatctctttcaccgaccttagctcaacaatttttgattttttgatgaaatgctgatagaagaattggcattgttaattggttattcagatgtggtctgatctcatcgcaaagagtaaagaaggtggagctgatgtggttcaaacttatgtgttttggaatgggcacgagcctgtaaagggtcaggttagccaaatttcctctttgtcctgtcttgatttagttaaaattggaaattttgatgtttatcttctatggctttgttcagtataactttgaaggaagatatgaccttgtcaaatttgtgaagcttattggatcaagtggtctttatctccatctacggataggtccttatgtttgtgctgagtggaactttgggtattttctttttttgcaaccattggtgtctcttagtcttcttttttattcagctttctctttattctttttgctccaattctttgttagggggttcccagtgtggctgcgggatattcctggcattgagtttcgaacagataatgaaccttttaaggtacttttttttaattgaatgctcatttcacattttctttgttattgtacttattaaattctgttttagcgttgttatcatcggacagactatcatatctttgtgtttgctattttccagaaagagatgcaaaagtttgtaacaaagattgtggatttgatgcgagaagcaaagctcttctgttggcaaggaggtcccataatcatgctgcaggtcatatgaaaatgttatatgttttgaactttatatccaaatcagtgagctttctttcttttattagtctttctataaaggtgtgattatacgtatgtggtgacagtctccggcattctttgttcgctgacaggacttgtcatgggctgaccagccctcttaattgaatgttgttaaattaatgcagcttgttgaatgagaatgcaccgtcgactgaaatattttcttacacagatcgagaatgaatatggggatgttgaaaaatcttacgggcagaagggaaaggattacgtcaaatgggcagctagcatggctctagggcttggtgctggagttccgtgggttatgtgcaaacaaacggacgctccagagaatattgtaatgttgctaacttgatttttgtgcattaagatgtctctgtttttatttgttgctgatcttgttcaccaggctgatgatttttacaacgattttctttgggtgcctaaaataagattgagatactcagtatttaccgacctgcaatcattgataatgacttgtaaaccatttgtttcattgattttctttggaatataaaaggggttttatctttcaattcataatgaaagattccttgtttttgaaaaccatccttgtgacgcctattaatctctttttatctcagattgatgcatgcaatggatactattgtgatggttttaaaccaaattcgcggacgaagccagtactttggacagaggattgggatggatggtatgtttttgtcatgcagtcttctgacaaagctttgctcttatcaaataagtgttttggtgaagtttttatttcaaggccaatgtaccagttggccttaactgttatgttaattggtatttggattaaatgagtatgttaggctgactttttgaaggtacacgaagtggggtggaagtttgcctcaccgacctgctgaagatcttgcatttgcagttgcaagattttatcagcgtggaggaagctttcaaaattattatatggtacaatagttacagactagattgttttctatttttcttgtccactttttcctgccgtagttcatttgcatcatcatcttcctgtttcatatttatttgcagctgatttcaaatgatattcagaaacaacaatgactagttccataggttttttgcttgagttgagaaactaggttttactaagccatagtatttactttacgtccctcccgtagaaccctcaaaaggcaaacgatgtaggagataatctacacaacttgcgggaattgtttttactcaacttgattattgaatgcctatgataacgctttcaatctgtttgcgttgcatatattgatgcgtctgttttatggttgcagtattttggtggaacaaactttggtcgaacttctggtggtcctttctacattacaagctatgattatgatgctcctcttgatgaatatggtgggtgcaagctaaggctagcaggagagcagattgctaagaaaaatttagttacttagttttctaatgaaattttgtttgtcatatactaaggtctgaggagcgagccaaaatgggggcatctaaaggaccttcatgctgccataaaactttgtgaacctgctcttgtcgcggcggatgcacctcaatatagaaaattgggatcaaagcaggaggtgttatcctactctcaaatgctagttgcatatagtgacattagtagaactcactcttcttatctaggtataataaactagtgctgttagatagatttcctgccggtttgattcttactctgctttacctgtcaagattttcacttagttctactataaggatagtcttcattgccatctattgggtgcttcttttaaatgtacgtataaatgtgatttatctactgaacaaaatacgggcctgttatttgattacctttcagaatgaagatgaggttttatattatacatgcttaagattccagattcttatttgtaaataacgcaaatttcaggcacacatttatcatggagatggtgagactggaggaaaggtgtgcgctgcatttctcgcaaacattgatgagcataaatctgcacatgtgaaatttaatggccagtcatatactttaccaccttggtcagtgagtatattgccagactgtcgacatgtggccttcaacactgccaaggtttgatttccatttctaccggtattctaaattcttttgactggtaattgcttgtgaaattctggaatggtttttgttgacagtttgtctttcttaaatttagtccagtggtctgaaaattcctttagcacattactgatatggttctttgtgactggatttttaaaaaaactgtcactgttggactagttctgtttctattgtttcatttttgaaactgccccagcctcaaatatcgtcctctgtgaacttgacatttctctcttaatcaggaaattggcttttttaattgcttcagatagtagttcgcccccaagatgattcctgacattatcgtttttgtctgttcttgagcaggtaggagcacaaacttctgttaaaacggttgagtctgcaaggccatctttaggtagtatgtctatactgcaaaaagtcgtgaggcaggataatgtttcttatatctcaaaatcatggatggctctgaaagaacctattggcatatggggtgaaaacaatttcactttccaaggattattggagcatttgaatgttacaaaagaccggtctgattacctgtggcataagacaaggtagatgcggagttgtctatttcatgatctaactaacatcaaccattgaagggaaagaattcctacaagatagatattcaagatgcttttacatcataatttgactgaattaccggaagttgtttgttgtatgtaatggctttttgcttctttgtcaaccaaatgtagaataagcgtatctgaagatgatatctcgttctggaagaaaaatggacctaactcaacagtgtcgattgatagcatgagggatgtgttacgtgtgtttgttaacaaacaactcgcaggtaatttacaacactcactcctgctttttatgcatgtctgcaattgtacaaatgcactgctcctgtattgtgtctgttcgtggttgggtatgccgtctcttgtgattcgctgtgtctaactatacatgagggttatagctttcataaagtgcaacgctttataaattgttttctcccatcttgtgctaactttttcctcctgctgaatggaagtaaaggcagtattgttggtcactgggtgaaggcagtgcagcctgtacgatttatacagggaaacaatgatttacttctgttgactcaaacagttggtttacaggttaatatctactacctaatttctctttttatcttttttcttacagctaattgtgatcactttcgactttgtggcacagaattatggtgctttcttggagaaggatggagccggttttagaggcaaagctaagcttactggattcaagaatggagatttagacctgtcaaaatcgtcatggacgtatcaggtgtagttagcgtgcatatggtttaaaattatatgtcttaaaaaaagttgaacgttgtggattcttttttctttctctcgctttatctgaaatatgaagattattttggaagcattgaatgtttggcgtttgttataggtgggattgaagggcgaggctgataaaatatatactgttgaacacaatgaaaaagctgagtggagtactttggagaccgatgcttcaccttcgatcttcatgtggtacaaggtaaatctgtgaaacatgttggcgttttgttttctcgtttctccgaaaacaaagatgttttcgtattaccgtccctcattaatctactgatcattgttcattttttttccccttattgaattagacatactttgaccccccggccggaacagatcctgttgttcttaatctggaaagtatgggaagggggcaagcttgggtcaatggacaacatattggaaggtattggaatatcatttcccaaaaggatggatgtgacagaacctgtgattatcgtggagcctacaattcagataagtgcacaacaaattgtggaaagcctacacaaaccaggtaatgtgcatgtaataactccgcaatgactattgaatgccatggtactgacataatatcattgtacaggtaccatgtaccgcgttcgtggttaaagccgtcaagtaatctacttgtgctctttgaagagactgggggaaacccatttaagatatcggttaagacagttactgctgggattctgtgcggtcaagtctcggaatcgcattatccacctctgcggaaatggtccacaccagattacataaacggaacaatgtcgataaacagtgtggcaccagaagtgcatctgcattgtgaagatggacatgtcatatcctccatagaatttgctagctatgggactccaagaggtagctgcgacgggttttctatcgggaaatgtcatgcatccaactcattatcaatcgtctctgaggtaaaattatattgcctgcaacactggcaactgattcaatcatacgaaggaatctaaaaaccggtgctggaaacataactccaattataatccaaagtagaacttatgatgatcttaatttcctaagcaagctagtagaaatattttgggtgcaaattgttgacatatagctctaaaacaggttcgtagcaattgcgtactataaattttgtggactatctgaacagttctttgctctcttctgcaggcttgtaaaggacgcaacagctgcttcatcgaggtatcaaatactgcttttatcagtgacccatgtagcggaactttaaagactttagcggttatgtcacgatgttccccgtctcaaaacatgagtgacctcagtttttagacaccaggaagcggctcagaacgatgaacagctgtttctctaagaaacaagagaccattgatattgattaaagaagtgtatgtcccatcacaagctttctttgacctttatatttcaaagtctgaactctgaacaattgtgtttgctcttgttcattggtgtatccaaactctacctggaaccaattaacagactcaaaaccatctctaaggtttcttaccgtatgtaatgatttagatctcagtggttttaaatgcaaataatatttatgtttatccttgctttacctggaaccaattaacagacccaaaatctttataacataatcaacaaagataaattacatgaacattcctaatatttcctttatcattactcaatggatcccaagcgcttgcatttgtctaatcatcaacatagacgaatcatacatttgcttgcggctaacgtcaccttcctttcctccttcctcttcgaagaacctctcgcttccatccaatatactcaccacttggctaatgctaggccttaacttcggatcggttctcgtgcaaactaaccctaaccgtaatagccttgccaattctcgattctcgtattcatcatccaaatgaatatctgcaatctcctccaagagtttttttcggttaccaactacttcgcggattcgcaacaccataagagcatcttcttttttcctcttgtaatccactgctggctgccccgtaaccatctcgagcactaccacgccaaagctgtatacatccgccatggttgtagcctcgccggattccatgtattctggtgccatataaccaaaaatcccttgagcagatcctttcttttttgcagcttgatgagccttgtcgtttctagacaaaaactctgccaatgcgaatccgcaaagccgcggattcatatctctatcaagaaatatagttgaagaagtaatgtttcggtgaatgacttgttcgtcccattcctcgtggagataacgtacagcgcaagcaagcgatttgatcacgttgtaccgacttttccatcgcaaaacagagtttccaggtatatgattatggaaaagaagatgacttagcttacgattcgcggaataatcgtacactacaagcatttctccgtgttcggtgcaccaaccacggagcattactaggttacggtgtcgaagccggcctaggttaagtagttcagtggagaaccgggtaacaagcgccggacatttagtcataccgagacgtttcaccacaatatgttggtctccatttagtaaaccataataagccgtaccaaaatcaacctcagcaacgcgacgtgcatcagagaaattatcagtggctaaaacaaggtcgttgtatgaaatctctcttggcgtgtccaatacgaaagactttgatgacatcactctccggctgttgtaattaaagtacggattttctccagtctccgccgtctggtaaatagaatcctcaagggcagtaacgtaatttgatgacggcgttgactccgacgacgcattgaagctagttgtggaggtggtggtggtcatcgttgttcttgtagtagtcgtagtcgccgaagttgaggttgattttaaagaagataaaggaatataaagaggatggctcttaaacgaaggtaacgccggtaagttaccggaaaactcgccggaaagtgctccgataacccatttcatgttgggacgatgcgttggattgtttaaagaacagagcagagcaagatgaatcattctcttcatatcagagagatcataagatccttttgctaaccgagaatccccggcgtcgagtaatttccggttatcggataatctccgaacccaatcaagtaaaatgattttatcttccgagaacgaaagatcaacggctcgtctaccggagacaacctctaaaaccacaacaccaaagctgaaaacatctgttttagcggtggcaacggtttttttccggaaactctccggtggtaagtacccgatagtcccaccgatccgagtcgaatccgcgactcggaactggtggttacggaaggaagaaacagagtcgtaactcgaatcatgctctgtttcatcaatcttgtgttctaaccaccgagctaaaccaaaatctccgagtttagcgttaaactcagaatccaacataacgttactcgtcttcacatctctgtgaatgatctgagtctctaactgctcgtggaggtagaacaacgcggcggcgagtcctttgacgattttacccctccgatcccaatccaacggtttaaaatcggagttaacttccggtcgtcggaaaagcacacgatctaagctccggttaggcatgtaatcgtaaacaagaagcaactcgtcttcgtgtagacaccaacctcttaacttcacaagatttcgatggcggagctgagccaccgcaacaagctccgccgcgaaagttttctcgaattgttctcctttcttctccgccaagcatttaacagccacggtggttccgtcgctcggtaacaacgccttgtaaacgcggccgaaaccgccgcttccgaggatcagttcgtcgctgaaaccattagttccgatataaagctcagagtatccaaagattcttggattctcgcaaccgactttgctggaaagctgaacaccttccatgtcagtgaatgatttattgatctccattgaaatcgaatctttactctcgttgatactacagagattcaagctcttcaccaacttagagccgtgtaatcgccggaataaatctccgattaaactcacaacttgacgtccacaatcacgactcttcttctcctcttcttcttctgtggtctcctcgaccatcaccggtggctttaactcgccggattctgtcggtagtacgaaacagagatgatccatagccattggcgccatgtgaatgtgtaaagatatcgaaatgtgaatgaatttaaagatgtgataatgctttataacattttgtgacgatctatttgaccgaccaaaattgaatgatggatttttgccagcaaggatgtttttatttatagtgtgtcttctttctagaaatatatgtgattttatcatctttaaaagtgtttgtataatttgaagattggaggcattaatttcaacaagattaggttcgctttgtttgaatatagcaaaccccttaatcgggtttggtcatttatggtgatgtgtcatggcccatgattcttcattttttggtataaagttattttccttttgttttattcttagttctaattgatttttcaacgataaattttttaaaaaaaaaccattgatttcgcgaaaatgattttacttagaaactatatatgtaaattgaaataaatgtatttatttacgtatggaaaaaatgagaacgaagaagactttcgaagcgtgtcgtcgggaagaacattgacgcggtcgaaactttgtcatcttctatttttcttcttttttttcttcctaaattaaattctaaatttgaataactttttactttttgatcaaggacgtgtaatgcatttgaaaataattacgcgctagtttaaatgttttataggttgtatttttctttcatcttatcggttatattcatagtttgaatgtgctttattaacctatcagtaagaagtaagggcaaaaagttttggtccatgcctttcacgagaatataaaatttgagcaattgagaaactaataacatgaatgatcaaccatttaacccaaaaaaatggcaacaaacaataacgacatgtcgacattcttcgttgcgtttttaattgtatgaatcaagtaaccaacaaggcaatgatatcatattcctggagctttttgttagtggagtactaaattcagatactttttaggtccgagaactaaaacatgtcacaacatcatttaactagtataaataggctttctcaaatataaactgaatttaaactttgatgatatttgtcatttgtggcgggtccaactgttatattcatatagtgatatagttcttgagatcgcttcattagttttagttttcggatgttttgaagattcgccggtgccttattttgccattgagtcttcaagaccgatcttgattgagatgactttagattagattatattttcacatatatacgcagaggaatgtagacattagactatatacttttgtatttttctagagactacttgtttttattaaaaaaattttattttttataaaaaagttcagactattttggagtctgttttatatgctggtttgaattcgataatattaatgataataaaatcatcaattgcgaataatattctagtagcgtttggaatcctgacttctttatattttttaactaattagttaacgaatctccattataaacactggttttaaaactcactgtgttgttttaagttgattacaagtattaggaccttgactaatcttttggtgaacatatcattcagcaaatagatttcgtaagtcaagtagttttcttcccagcaatcaggtagttcagaagtattacttgattctggtaagatttttaatgaagaattaagaccaaataactttaccccaacttttgctcaaaaaaataaaaataaaaataaatattagatcaattcagttcatgagtttaaacgtcttactaactttactgtctaaaaaagatggcaatataaaataatatgtatataattttaatatttaccgcaaagttttactgctatatgggtttgtaacgttaattaaccaaagtaagaaaaaaaaaaaacagatgtacgaacgtaactcaaagggaacttgagttgagtggaggaaagtggaggacaaacatgagtaagatgttgatatgaaaatagaaaatggtaagcaaagtaattatgattatacgttttgattataccccaatattatgagggattaatggattatcaatcaaatccgccccaccataaacgtttcatctatatataatcttgatttatgacatcaaaacacatgtgattatacctcccaatcactcatgtcgagttcgtgtctcttaaatgatcaacactttatgaaaatgaaaagacccaaagtcaacagtttctatttctttagaagcagggactgcattaagatccaacttcaattacttttgtcctaaattactctccaatgatatatagtaagctttgcatagataatttagtgtttatccaacatatgtactatataacttactgtttacagtttctagcattttggacatgtaaaaccagtgggtaagcaatttctatcttaatgaaaatattcaatcatagaatggtgtgtggaattctttggatataaattaaactataaataacagatttagaagttaagaaattataaattggtagagcacactttgctctttctatattggacttggacgcaattaataaacagccgcatcaaaaagttgatagttgcattcccatatccactgatttaaaagttgattactactgtatctgaatataaacaatttaaaaaaatttgtaccaatttatacataacatatgaggttttttttttctttctaaatactgccacctagcctctaattaaaaggaaatgaaagttttggtggccgcaacaaatggcgtgatcagtgtctatttacaagagtttcagtgaaagatttctattttgtctcacccaaaaaaaatgaagatttatattttacgtatttaatttatctattttagaattatattggttattttcttcgaattgtcaattgttttgtatctggagaagtcaatatttgaacagttggaaattgaaaaactttaaaggattcaacggacataatgccaccataaatgcaaaaagataaggtggcaattcattaaagaaaagagagcttataaagataagattgctacttcaaaagataagtaattgatatagggaggagattggtgattagaagattcaaaatttcatattaattactttcaaaattatatacttatatatagttttcttttgttaaagtagattatatatatatatatatataaagttggtttgtaaacgttgtatatctatagcttcattttatttatttattttacaataaatggactagcaggagaggttgggtgatgtcgttggcctaccttattttgttcatcaattttttttgtttgctttcattttcaaagcccacgagaagattatggtttgggaatctcttagtgtaattgttccaactgctactcactcatgctttgatccgaataagtatgacctttttggccaattatttcaactacatttttataagcttctttaaatgaattaattaaagatgctaatttttcaatcattttgtagccactcatcatatatactccttagtaactattaagtataactcacccatcagattcttatcttgacatatgtatctatttttttccatcatttctttatagtattttatcaagatgagaatatatgtatatcaagcttacgaggtttatattgaatctagatcagatcttgtaaaacaaacgaacaaaatgctgaactaatctatccaaaccgagcaaacaaaaatctatcagtaaactaaaatgggttggtaagccattctgaatttttaaagacattgtctaaagatatttgattcagttttacatgtgtaactagttttcgggaaaatcagtctagtaaaaatcgaagcaaatatattaattttatatattcagttttttttagttttaataatgacatcaagtgaaaagacacgatgtgtaggaaatttttaaaaaggttaaagtagtcgtatacattatacatatagtttcgtggtttggtcatatactaaagatccaaatttgtaggaaattcactttataaaaacatcagagaataatgtataaatgtgatcaataattctcaaacaaacatacctgagaaacttaattagtcttccttcaccaaaaaaccaagacttcgtaagaaaattaattaggtgatgaaacttaagagacagacaattctgatagtacaagaagtttgaaaatatggtacatgaagatgtcttagtactttatttaattatatattattcatcaaacgatatgatttttgctttgctataaattgtttttttttggtaaagtgattgattaattttttataagtctttttcttcataatatatatcaactactatcaattatatgcttttgccaaatatgagtgtatattgttcacatacgtacataacaatattactaatttgatatataaaagattaaaagttaacaacatttataattgttccgcaatgatatattacaaacgataaagaaaacttacacctacttgcaactaaaattggctttaccgtgactgaagctcacatttttcaatataaaagaaaaaaaccaatataaatattgactttaagaatgctgttttgtattcagaaaaattgtagcgaaaaaaacattcaaataggcaaatggtttatgaatgtgtgtagtagggaaagtgtcaaagtggggttatagactttatagtttgcttcgatgaaagatgatttcttttgacagtcatattgggctctgactggattctatttataaactgcggcccactttaaaccatagtggtcttcaattgtcatacaatatcggatatcctaatcccactagtgcgttaccttaaggaaagtaagagaaaatgtttttggacagaccaaattcctcatcctcattgaaagagaggccgttctcatcactcttctcctatgtcgagtgtttcaaaaatctcaaccgtagaggcatcaagagctactgttgttcgcccgccttcaatggcaaaagaacaagcatcactctcggatctattacaagaccgaggattgatcgacttcaaactgatcactttcgaagtacttttcgaggagcttctggttgtcatcattgattttaaacttctatcttatcgctttcaaacattctttttcaattgtgtttctatttcaaatattcgacaagtaaattctttggtgaagagcttccggattagtgttgttgttgtaaccgcaagttaattttaatataatattatattggtgtttcaaaacaaaacaaattttggtaaaataattaataaccatcaactggatcacgtcaaaattgttttaaaagttaacgcgtcattgattcgagacacgtcttcgacatttttatgtaatgtgaaacgttagagcatctccaatggtaagagccaatgagtggctctcaccaatttttttctaataaattttagattatccaatgttagagagcccatgatactgttttaagaaaaaccttctccaatggttgaatacatgaggagttcttaagaatgtttcttttgaaaataaagcttggtttcttaaacatgagaagttccatactcaattcaaaaatggcaatacttcataacacagatgattacaattacacaagaaaaaagagttgctaccttttgaccacttgaagacagcttctcaaaagtgtttggatcaaagtaaatttatgattataagacacaacatatcagttgggcattgacgataggtgtaacacacaagagtcctcattccagttggacacgatccatgtcgtttatcatacctttaagctgtgcaatggaaaaaaaaaaagaagaagtcaaagatcaaaaatgacagtcaggacacccatatgcaagaagaaatcaccataacgttttgagggttttgattccacaacgtagatcatgatttagaatcaaacaaaaactacctttctatcaaacttcatcacatgatagtcatactcttatatttaggtcatcatccattcatcaatgctaattatattgttatcaacaatgtttcataacgttaaagtaacatgaataatcaaattatgagtatgataataatagaatccatgtagctaagtggattaatcaaaaggattctttgtaacagggaggattcatttgaaagaagcttactaaacaagatcttcctgttattggcgagattttcaggattcaaaacatattggggcattactaaacatgagcttaatcatcttcctatctcacaacgctttgttaaaatagcttctctagctatatctattcttcctcaagtagcaaacaagaaacttcacactagaagcccatcacaactatcagaaactaattgtctccgtcagtccaaaccataaaacaatcggatacaaaacttaaattctttatacaatctacagagctttagttgcttcaatttccagtcaaaagaagaagcaattaccactattcaataacagaataagatcccaaaagttgatataaaaagcttcaacttttagtaagaatcgcttctaagaagaacatatcatccaaatctatatattgatccaatgattaggcttattgaatgcaaacaaatacgaagtttaaaggttgactaacctgttccatagcagcctgagcggcactcatgagcttagtgacgagacctagcttgcgatgggtacgaagaatggcgagagaagtgatatgctcgtgtcactcgttgcctctcctcaacgattactctccaactgggagtcgcaaatctccgattaggtgaacctcgcttcgccgatggtgagaagctgacgaatccagcggaacgacttgtcagaaaccgaaattttgaatttgccgttaatttcaccctcaattgtcgaagcaaaattcaatctttatcgccatagtctcgcctaaagaaagatacagagagtcgtgggaattccaaaaaggcaaaattcactctccatcgccatagtctcgtctaaaaacgtgatacgtcatcgtctctcttaccttccaaaatctctgtcaagagagacagctctctcaaaaattaatcattctgatttattttttccaacttttaataagagaaaccgtgaagaaagctccatttttacaccgttggagatgctcttagaagttacataatcaaaccagctctctcggctattagtggaatgaagactactttctataatttcatattttggccgtaactcaaaaatgactacatgataacaataattggtctgacaatattaccaatgacatttaatttttagacatcctataaccaaattacttccaaaggaccaaagctaggtcataaatatacatatatacagcttttgttatacttctttctctctttttaagatcactatatacgtatatcataatcacattgattaatcagattttaatagtaaagtgtcatttcaaggtttctattttgtgttcacttatagatgaaaacgtgttgatgatttcacatgcttttttaacttaatttcgcaatgcattgacaaaagcgtcgctcaagttgtggctaacattaaattactttaccaaccattcgattgcctctaactctctcttttttctgctaatatactctaaaactttaacactatatgatttgaacacatgatttttagtcaattagactttggattttagacatgtaagaatttttctaggttagatttatttagttctgatgtaatcttgggtaaaaattgtagtatgaggttaataatcctactatattatttgggaagtacattttaaatgtaaccttaatttttgtaagtaattacataggtatgccattagaaataaaattttaaagagtaaattaatttatctctttaaggattaaaaagtcaaatactcatttaattaattaaatttaattaaaaaacgaaatacattattaatttccaaaaataataaccaatcaaaatcaacatataagatttgatatctaaattttaattaatttaatttaattagaaaaacgaaatacattattaatttccaaaaaagtaaccaattaaaatcaacaaattatatttgatatctaaattatcatattatttttttattaattattatagttcacttctcatctttatatgattttatttttgcggaaaaataatatcatcattataaaagaataattagagttttttcccatatgccataatttgaatttttaaaaacaaatataaactgttcaatacataaaaaaatattataacgggtaaaaaatagatttaagaaaactttctactgagtaacaggtcataatttgaaatatttatattcaatttcatacatattatattgaaaatttataatcttatatattacaataattaataacatattagatgtgattcaatttttaatacaagttggaaatcatagaattgcatgtttagatcgatattaatacaaaatggtatactacaggtgaaactcgtaaattaacaatcaaactacaagtgtataatcttaaacactaaacaatatagataatatcaacaaaacatatacaactcacagtttactatacatttaaaatcaaataaaataatatcaaatatttttaaatcatctttacaataaaaaaatttagtttaactaaaatatatactgcaggttaatatctagattatagggcttattggatctaaagacgggtcatcaaagatttcttaaactgaagcaaaatatattgaatattcaaatatctatctgttaccaaattataaacaaataagtcaatttaatattttatatacaaaatcaattaaatcttaatcacataaaaattagcacaaaaaaagtattcatcaattaaaaaattatcaaatctctgtgttatataagttttgatactatattcgaataaagtgtaatataccttttcaatttgtattctttaactaatttaagctaactaatatatttgctaatcttatacctatcaaaaccgactatcgtttcttatctctatagtatttttgcaagacttttttggtggatttggataaaagtgcattcgggtcatatggtacattctcctataaattaaatatggtgcactcctatgttattagctaaaatgtttagattctaattcagagtcatatcattaataaaattaatattaacaaaataaatagctttttggcaagacggatttggagggacgggtttttgaatcaacattaataaaaaaataaaatataattaatccaccgtttcaatacgggttaaatctttaatttattattttttaagaccactaatattaaacatatcaaatcatcctaatttagaaaaaattatataaaaccaaaaatgttatgtggtatgtataatgttactatatataaaattaaactatagatataaatgtattagagaatgatacaatttgcaaaacttttttatataaaaaattattcttaaatgttaaaaaattactattttttaaaaaaatcacgtgacggtaaaaaaaattacagaacgagttctattttggaattgggttatatggtggatgtatttgaatcaatatttataaaattttaaaatattattaatatgctgttttaataggggttaaaacttcagttttttaacaattatttcatgaattcgtggtataccgttacttaataacaattataaactgtaaaatataaatattttataaaaataaaatttgcaagttttaatatatattacttttaaaaaataaatcgtcccgcggtataccgcgggttaaaatctactaacagtttataaattaaagcacttaaaacaaaacaaaaaaagatgataagaagtagagaaataagaagaaagtcttgactcctttatacttaagtcttaaccaatcaaaatgcacgaaattttgacgtcaaaatataaaagagttcctgaatatcaaattctagctagattccaccatatatgtaaatactaacattcaccgtatacatcattgttttctataaactctttaaagttcttgtcaatgattcgacaaagcattatatgtaatttatgtcgtataagtaaataaaagaaatactcaagaaaaatataaatatgagcttaactataatctaagaaaagcatagtctctctctctctctctctcataatacatagaggagaataaaaaaatgatgtgtttccaaaacttcaaagttcgtaaattctttacgtcgaggaactccggtaaagtatctccagacaccgtctcaaaatcagcggagaacagattgtggaaagaatttcaagaaaaagatgacgttctgaagatccatgtgagatcgtggttaccttcgccggaaaatattttccggtgggaagccaccgttaacggcccggtgggttgcccttacgaaaaaggagtcttcaccgtctctgttcacatcccacccaaatatccttatgaaccacccaaaatcacattcaagactaaggtaaccaaaattagaaatccggtttaatttagtctttcggaaatgtttggttcccggttaaaaatttcgttttatgtttttggatccagatttttcatcctaatataagcgaaattggagaaatctttgttgatatattgggatcacgatggtcatcagccttgaccattaacttggtgttgctctctatatgttcgattttatcgaacccggttgaaccgttattggttagcaatcatgccgcgagactgtaccagaaagaccggaaagcttacgagaaagttgcgcgagaatggactttgaagtatgcaaagggatgattagttgttctcaagtttttttgatgtctattgcgattaaactatatgacttctgttttgtttcgtcagtttagtgtcgtgtaaggtcgtttactaccgagagattgaatacaatagttgtctttgtattcaagacgtcagcagctgctaaaccttgttaaaaattgtttgtgtgcttctgtttttttttttttttttttacttttacagtaaccaattcaaatattattaaccgcagaaaatttagatatatgagtgttttttgaaggacattgaaaatgatttcttagtcgtttatcaaatactacattacgtacaagttgtaactcggtgatacgttttactttatatagtaataaatcatgtacatagacacatatatacatatatacaaatgaatgatcacatataaacaccataaatttaatttaaaaatgagggtacaatataataaatattcgataaataacattataaacgaaacagaaaaaataaaatatatattgcagttcagatgagactcacgactttgatgaatctagggattggccttttgtttgagacatgataatctaggaaactttggactacatccccatgcatgatcttgtaagagaacttcgtagcttatcacatcttccgcattggtcttgagtgttgcaaatgtgaagaacaccataataagagccatatatattattatagcctttgttgatttcttagagatacccatatctttttctttcttttttttttgaatgaacgaaggaaaaaagcttgaatttatctgtagaaagattagcttttttgttttttttgttgtggagaaacatgaagggattatcaaacctttaaataatattcaagatgggagacaatattgttatgtttctttcctttttttggcatgtagatttggagtatctatctaaaatatggatattgttattttactattttactcctaaagtgattagaatttagtttcacgtctaaagagatatcgaaagttttaaagattttgttatcattgcaagtttgcaacaatatactggataaacagttcaacaaaactgaatcaattaacaaaacaaaaagacagatttatacttttgtttttctgaatggtacaaaaacaataaactgcaaattacaggcaaattatgttttgattagtttttttttttttttttgaaccaagttttgattagttttcttaactcgttcaattatctggtttcttcttcgtaaatatgaaatgaatattagtcgatggatttacggccagtcggccgccttgaaaaatcagtaagcagtttggtagtggcggacccagccaaaaaattaagtgggtacaaaatgtagccagatagaatcgaaccagccaccttcaccatttaatgctttgaaagctataaacgtatcttttttttgggggcaaaagctataaacgtatcttaatcggaaaaaaagatacgtacatgaaagctgttataatcaagtttctaacaaacatacaaaaccgaaattcctactctactataatattcgttttaagaactagttatgatttatgatttttacattctttatataactttattttagctgaaacgataatttattcaaaacatgaagttcatatccatatatataaaataaaattacacatagacggtattaattttcttacgtataacataataactacattaggaaagtcactttctcatcaacttaagtagtttgtgctaatgtcgtcgatatcagcattcacatttaaatccgtatgatacatgttctagacaaaagaaactagaaacacataattgtgtatatataaccattaaaatatagattgattgatatgatcgttttcatcaacgattgtagagaaagattacactttattatcatataaattgcaatttatctatgaaaggataaaataggaatatatatatatatatatgaatatatataataatcataaataaatatatcttaatccatataaaagaatacattttcccattaccaaaaaaaagaatacatttgccgccctcttgttctccataatacgttttgttgatttcttttttgagattttttgatatatatgactccgaatcgtgttttcatatcacaaaaattccaacccctatgaagcttcactgttttttgggggtggcttcgtatatggatttgccctagttttctggcaaaactgaggatatttttgagaacatccccatgcatgattcacacgcattgactcatatgatataacttgctccctgttgattgtatccgccttaacaacaaaaataatcagtagagcgacacataaaaccgatattgccttcaacatcgccatattttcaaaacgaacaaagtaaactaaatggatttacacttacttttgattatttattactttcttatagatttctaatttctaattttgcgttgatgctttataaaaatagttggttgcgtttgctaaataaagttaattgttttggaggttccttagttatccaattccaacaagactttctttcacaaatgtaattattgttattagttccaacttccaacagtacatatataagatctatgttagctaataacaactaaatgtcgatccaaaattgattcttaaaatgtcaatcaaagttagttctttttagttttgtgtagtgtaaaattagataaatgtattaactctattttattttattttgccttttttcctgattttatctactcagattttattttcctttttgcttactcaaactttttttttatataattataaatagtacatggtctacttctataattaagttacaaaactatctatattcccagttgagtagttgacctttaaatatttcttttcttttatttaaaaacgaattttttcattttatattattattattattattggtaaaagacgattaaaaaagaaaattatttgtgggtaattttttattttgtttcctttacccttgtgacttgggttctcttcgtctccctctctctttgtccgagtaagatactgaatatatatagtctctctcgactctgttactctcgacaacgttggcaaaaaaaagtaaagaaaaaaaaacgaactttgtgagttgtgacaaaaccttctttgtgctcgtatctctcacaaatccctagattaggttagtttctaatctcttggacttcgtttcgtcttccatccttctcacgtttaatattattctctttgattcttcttctgctttgtgggtttaagggtaaaacatatggactctgcttttttacaacttttatttaaaaaagcatctgttttttgcgtttaaggtttagttgactactagtatttagtataaaaatcccaactttttagttgtttagaccactggaagattttgactctttgaatttcggatttttgttgggtagtttttacatactaagtattgtaaggtaaaaagttggaacctttttgcaatgtgtgtgctaaaagaatcctggggtttgtttgattttcattaatgtacaagttgattgttactccttctctgtttgtttcgtctaatgcttcattatttatttgctaagctgtgatttgattattcggatgaagctaacatctttctgtataatggtgtctttacgcagtctcctttgtctggctttgaaagtttggtatatttataattagtaacgaatgggaaagagattaaagaagggtcaaaagcctccatatatgaggtttgctgcaacggtctccgagaagcaatctgagcaaagcgtggaagtaactgaggagtttgctgtgacaatgacagaaaaaagatcttgtgtccattttgataaatatgttgatttggataagttgttgaaaattatcaaatcttatcaacaaatcaagtgtggagaatgcaatgaaagagttcacgtgaagagaggaagtagatggggtgctagtaacaggagagactggtattcttcctctgaccagaattgtgctagaaatgctatttggctttgtttggaatgtggctattatgtttgtggagatgttggtttgccgactgaggctcagagtcatgttatggggcataacaggttgacgcgtcaccgtttggtgattcaatgtaaaaatcctcagttaaggtggtgtttctcatgccaatcacttctcccttttgataatgaagagaatggtgagaaaaaagatttgttgctggaagttgtgaaattgattagagaaagatctccaaacacgtactctgcttcatttgaaactgaattttcatgttcaggaagtatctatggtggtatagaagcaagagatggttatgctgtaagaggtttagttaaccttgggaacacatgtttctttaattctgtaatgcagaaccttctctctttggatcaattacgtgagcacttcttgaaagaggatctatctgttagcgggcctctcgtttcttccctgaaggaactatttgctgaatcaaattcagaggcaagcgtttttaggaatgagataaatccaagagaccttttcttttctgtctgttctcaggctccccaatttaggggatatcagcagcatgacagtcatgagttgctaagatgtttgttggatggtttgagcattgaagaatcgagcctgaggaagaagcttggtgtttctgatagtaatgacagttctacatatcagaaacctactctcatagattctgtatttggaggtgaaatatcgagcactgtttcttgtttagaatgcggacatttctcaaaagtgtatgaaccctttatggatctctctttacccgttccgtccatgaaacttcctcctaaaaagcaacaaatcctttctcaggcaaaggaggtccttaagaatggggcagtcagcaaagattcagaagttgtgtccgctaaacctgcatcggatcacaattccacagttccactctttccatcggatcacaagattcaaagcaggtctctgaaatcacaatagatactgatacggaacaggataacttatggtccgaacatgatgacttttggtcgaattttcttagaccagaaacctctgacaatgaaaccgatttggttttgctaagcgatgttagtgatactgccccatcaaccgaggctaaaggagttaatcagattttggtaggtagcacagaaacgctgatgcatgataatgatcgaactggaaaaactgtaccagataaagaagatgtacgagctacgcagtctaatgaagaaacatctgcaagtgggatttcagcagtgatagatgaggctcaagtttgcggttgtcctgatttagagcaaagttcttcatctgcaaatcagggggctgatgaagagcttgccttgatggttgcagattctcaggttctgtatatgccttataaagatcacttattctatgatgattatatggttgcagaagcttcctcgtcattcgtgagcggtgaccatgaaccaaaaaaagactattttgactttagcagttttcttgatgagcctgagatacgcgaaggacctgtttttagaccactatctaaatctgaagtttatgaagctggttttaaggctgactgcagtgatgataaaacagttagtgcaggtaagggtgaagcttcctcgtcattcataagtagtgaccatgaacaaaacatagattatgttgactttagcagtttttttgacgagcctgagatatccgaaagacctttctttcgaccgctatctaaatctgaagtttctgaagctggttttaaggctgactgcagtgatgataaaacagttagtgcaggtaagggtgaagcttcctcgtcattcgtaagcagtgaccatgaacaaaacatagattatgttgactttagcagtttttttgatgagcctgagatatccgaaagacctttctttcgaccgctatctaaatctgaagtttctgaagcaggttttatggctgtcagcggtaatgataaaacagttagggcaggtaagggtgaaactttttcttcattcatgagcggtgacaatgaacgaaacatagattatgttgagtttactaacagaatattcgatgatcgtgggacatctgaaagacctgtttttggaccaccatctaaagctaaagtttctgaagctggttttgtggctgtaagcagcgactctgatcctgcagttcttgatgaatcggattcaccagtgtctgtagataggtgtttggctcagttcacgaagcatgagattttgtcagaagacaatgcttggcattgtgagaattgttcgaagaacctaaaacttcagcggttgagagaaaagagaagaactaaagaaggattgagcaacagatgggtgaatgaaaatggagctagttcggcttttgatgagtgtagagacagttcactaaatcaatcctgtatagatctcgaaaacggttacaaagctgctcctccgatcacaaaattgccaaactgcaaggaagaggaaagcgcaatagatgatggatttgtgggagaggaaaatacaaagcaagctccaattacttctgttactgaaacacctctcctcggtggagaaaccatcagttctcaaccagccagtgacaatgaatgtgaaaattgggaagacttggcagtagattctgaagaagtgatagtaaaaagagatgctaggaaaaaggtacttataaacaaggcaccacctgtcttgaccatacatctcaaaaggttcagccaagatgctcgaggcagggtaagcaagctaagtggccatgttgatttccaagagttcatcgatcttagcaaatacatggacactaggtatgcccattttctctatatacataatcttttcttttaatgttaccacatttggtcagaaaccatcataaaatccactaatcgttaatttctctcgctctctaggtgctccgaagaagacgagccggtttacaggttggccgggttagtggaacatttaggggcaatgagtcgaggtcattatgtttcttacattagaggaggccacaaggagaggagagactctgatactaaagaaccaaactcatccatatggtatcacgcaagcgattctcaggttcgaccggcttctttggaagaagttctccgttctgaagcctatatcttattttacgaacgaatctgagaacacggaggctggatatcttttttttttttttttctctttctataatttaggttaatagaacaagataggtttaacgttcttcacacattgtgctggtgaactctcttgacttaagtttagcattttgccttgtttgaaaagttaagtgtttttacgttcagcttatagataatggctacgtaaactgtagaacgttataaaatctaccggtataactacttggtttagttgcaaaccgagcacatttcaggctgacgtacaatatgtattacgtcggcggcgagatagtacaggtcttgattccggttccagctccacaatgcatgcgtctcattcttcacctgaaaaggccaacgtaaaaaaaaacacttcgttttaagcaattttaaattggtacaatctgagaaaacaacggaccggttctgagtttgatccatgatgcttatgcccaagaactattcttagtaggttacttgaacatcaagcgataaagaatagagagagatctaacttacttctagtataccgaaaccgaagctgctttctctgtatgcgctatactccggctgcttaaccggacaagtctcatcttttacaggctccaacgtggagttcaagccgctggatctgcacgagtagttctgagaaggatctggaatatttcctgggtcgtctacatgctgagtctccagcttcccagctcctcctgcaccggttgttatataaaccgggccacattggtctaacgtgtagttgtagactctgtttgatctctcatatgcatcaacctagttcaggttttgtgggaaattagcgtaaaagaagatatttcccaaaagcaaaggaatactttaacagaacaacacacatacatgactattgaagacgatatcgactcggtagttatagagcaagtcttcaaggtgaatcctcattgattcagcttctctgtaatgccctttgaatgtgctgtaccaaggaagactccaagttgcaaccacccatggagtttctgatctgtttattttgatcaggtcactttcaagccaaatatactgatcagctgttgaagaaacagggaattaagaaaatcagaaacacatttcaatgaaatttaaacctaaagagagaaaatcaaaacctggagaaactatacatgagttatcataaagtgtgtatgaattgagcactatgaaatgagctcctcccgcgttgaaagaatagtataatggtgagaaagaaccgctttcgtttgaagggaatgcgaatcttgaactgtatgcagcgaatgtcagattattctcggtctgcggctcaatctcgtgctcccctgctaccatcatggttggaacattagccgtgagtggctccatgaacctgtcatcaaagacaaagcccccaataatttagtgtttaaaaccatcaaaggattcacaatcactagagaagaatcttcttttaccttccccaataatcccagcgaggctgataagtttctccactagaataacaagaaccacaatcagaactagttccattttggtcacaatgacaagaactacaatctagtttagtcttattcgcaagataagtatcagcgtagctgaatcctccaagtaaaaccacaagatctggatggttagacagaatatgccccaaaacagttgatgtgttgtaagtaagacccaaatctccagccacaacgattctgtgtggataattctctgatgtagacttaggcattgtcctgaagtaatactctttgctcattgctgataaagacgggtctccgcattggtatcggtacaatgtgtttggtttaagacctgtgagttgaacatggtgaatgatgcctgaagtatagttcatgaaaccattctcagaagaatactgttggttataaacaatagaatggcctgttgcattttgcttcctagtacgacgaacatcgaattcacggtattgaactatgctttgcacacaattaggatccagaggtgcagaatctttttcaccaatttggtattcccctgtagtatataatacaacaaccatgcttcagagttcagacaaatgcaaatagttaacttaaaggatgaatatttaagcaaaaatcttgatgaagcttcttaagtagatccagctcttggctcaaaaagattaaacctttatgtactttcaagataaactaatcacacattccacatttttgtaaacataaataagtccaattttgagaatttaataatatttcaagacttttgtagtaaaaaaaattgttttttccgaaaggtaaagaaagttgaagagacaaatagagacctgtgacccaagaaatccagacggagtcaaagctgtaagagagagagacagagatctgttcgggaagaagaaactccgaaatgggttttacgaaactcgggtcggattctggtaagtcgaatgcaatcgggttaagattcgggtcgagtggagcagtaacggggttaagcggaccgtcgagtgtcgatgggaaaccatgaacgatgatagtaacagtagaagcgaaaatgacgaaaaaggacatcgacattgtatattttaccaccattttcacataaatgttttgttgcagcgaagaagataataaactctattagaccaaaaaaaaaaacaagaagataataaactctgtttggaatgaaatcttaacatgaaatcttaagatagtaaactctttaccacagaaaattggttatttacaggaaggtaatatcaattccgattatttcccggttaactctgtgaaccggtggacgctttctcgatattccggttctcagattatttaccaattaccgagagaaaaacattaactaatttccttggaaaatattagtacgaattaacaacaacgttaagagagacttaagatgcaacattgaaactaaaagagtaattaagaaaaataactaaagttctttagaaagcctaatctgtttatcccgcgaacaaatcgggaaaattttgaagaaactccggcgagatctcaaggagtgtaaggaccgccaccaccaagttccatgaccatacagatctcatcttcttcttccatgtgcagctgttggaacaaaaaagtaaatgaaagttaacagtgaccaacagtgttgttgtagatacataataatataaacaaaaatcagaagaaactaaagatgagagagacctgagcaggagtctgtcgagctttgatttctctaccattgtagacgaatcggacagaactgtaatctaagtttctcttcgtacagtaagcactcattagtttctttagatgtgcatgagttccaattttatacaaatcctctgctccctgttggttcttgaccttgagagtgactttcatatggggtgatgtttcaggagatcgagacttctttgatacaaatgaagcagagattgtgtctgtggaactcaccattgttgttttgagaaacctttttttttttgaggtttcttctgggttcagagagagaaagagagagaaagagagaggaggaggtgagaaagagatgatgggaaaagttaaaagagctttgaacgaacattaaagtacaatcctcgtcaaacactcctattggtccatttttacttattgagtttcccattttacccttggtggtggtcttttgttttctcgcctttgaatcatcatcactccacagttcacacgtttcgtattccaacagtacgttgaaaattgtactgactcaacaacaggctcattgttacaaattcaaacatatttcaaatggtacaactagcacaaaaagataaagggaaacaaaaaaactaatacagctgttagaacttaagaaagaactgtataatagactaagctttcgtttatcgtcggtctctccaaaccaaaaacatcacatctagagaggaggagtctcatcctaaagagaatttccatgtctaaaatttctctaacaaaatcaattatttgtacttttttacctccacaaagtgtctgacttgagatgattcaataaacaagaagagacactggaactctggaagatgtgtgagaaggaatggattgatatcttcatcatcgtcattattttcgtcgtcatcatcatcatcgtcataaataatcgatataatctggagattggatgattcgaattagctccttcaggtttgctagaacctgacgtggtcctagactattttcccccacaaagttcaagagttgctcgatgttctgtgatacgatgactatgattagatgagaggagaggcaagctactgtttcaagtatcagggagaagagcaaaaccaaaaaaaatctctaactaaccttgtttagtaagaagacagcataggcagctcgtgttgtatcttgaccatccagaaacagaggaaactctacaaagttaatattttgggaaagcgtggtaatcggagacatgtctgatggtgaaggctcaatgtaaggtgcatagtctcgaatgtatgttttggaaccccccaggcacaaaggataacgaattggcactctcaagtaaggagctattagtgacacggcctgcaaaagccaagcaggaagccattaatactttctatcaagaatttaaaccaaacaaaattcgtttgtttgaattcattagcagtgattcctgaaatccaagccaagagatttaaggccgcacaatagatatggaagtataaagcaagttttaatgcataaatcagtaaggaaaaagaggacggaacatacatgggctacatatcctagggcagttgcagacttctgaacttctttcttgtcggtgaagaagctcatctttgtaaacggggccatactaaaaggcaaccccagaattctcacagatccttgactcagaggcttagttcctacaaaagccatagatataaacatgtcaagaaggtagatgctgcaattaaaaactttctgtaaacacttacgacaacaaaggcaaagttagtcctgatatcaatatcagactgaatgaagtaaagataaaggcatgcactgaaagatgttaaggagttaggtctcgttctcatcaaaggctacattcttaattcttataagattttagacttaactgacctaatctactgccaccaggaaatgattccagttcttggtcttgtgaaggtccagcttcaatcttcaagggatagataaatgaaacttgagataccatgaactgctgcctctttctcagcttattcgttacaatctttaaatgtgcataaccactttctccttctagttggcagtttgattcctatgaaaagagaaaaataagttaaaacagtgtatctatgattcaatcattcacaaattgttcatagaatggagaatatactgaagaaaattagctttccttctttaaagaaacagctatcaaataattcatactagaactaaaatacagttagaagaagaaaaagtaagtcgtaaaataaactgtactcctgccaaagaagaggccaagagaacatggggaaacaactaatttgaaatagccaaacaccaggatatgcaaaactgatgcaccttgcttcctaataagataattctgcactgaatgaggtaatacctgcaatttgcttttagcgatcgaaagagttgttccgcctactagcaaagacctcacttctgtactaagattctcctctttctttttaacatcctgctcagtaactttgcaagcaactgatgtcttgtccaccaacaattttcttgcttcaagcctctgacgcatttcttcaagttcattagtgcgtctcaatgattcagtactaacctgcccgaaattttgccgcccgctaatccgcgggctaatcaattaaagctcatcgagtagataaagtaagagataagcaagaataataagactaaacaacacattcctaaccaacacaataagaaagcataaattttctttgaatagagtttcttcttctagctatcttcatccacccttaagacaatgccactaataaaaatctatgctttacactcagaaatgaatcaaattcagacatgcccaaaagaaaacacatgagtaagagaaaaacctgaataagagactcaagtttcggttgcaggatttgtttcctctctgtggctaatttcatagcagaagaaagactccataacctcgtaagctcatggtcgaattcttcccattctataatcttcccatcttctcgatcgcttcttctcaaattttctgacaaacttcgctctgatactctttccatcaacaattatctcggaacccacgcaacgcaagttctgacatcaagtcttcagatcttttcatatcacgcttcgaaattcatcatcaatcttaaaggaaccgagagatcggattagaacaatcaaaaaccctaatttttaataaaccgatcacctggagatgatgattggtacaaaggaagagcaatggaagcaagaaacgaatctgggaaatgagagattggtacgtagaatgaaaaatttacaggattgaagaagcttctcgggctgatgattcgttgttcgattttgcagaaaatttaaagtttgttactttaggaaagagagagagattagaaacttccgggtcagagatgacccgaatgacttaacaggtgggtattatctaaagaccgggttaagcagtaggcaccgttcgatccggccaactggtggcgaactggcgattcctcgtggaaagtatgattcctttaaccaaagttgttttgtactttgtaccaaaccaattatttcgtcctggttatctcaagtttgaaccaattattatgtatcttaatttaactttaacatttaccattcacattctactttaaacttcatatttcgaatagactacagtttaacattcagctaactttttatgtgtatgttaacttccatatctaatttagccatccaaattcttgctaacgaaaagtcaaattctcttgtcatagtttcaaaacattctcattcatacatcaaaatccatttattatatagtattcgaaattaagtttctttcgagagatcatattcatatagtttttggttgctccacatcttaaggaacgagaaagagagaaatttgtaatttatgcatccttgtaaaacaaaatcgattgatttacttacaattccaaaatgtatctgaaatgtgattcaacatgctataaatactgaatgtgcattcattaacaatgtcttaaggcttaagcagttttttcatgtataatctcaagttttttcaaatcctttgtctgtgaataatactgactttgaacatctttcccttcttccatcatcctcttaaccattgctaccctctcaagcatcctatccactgcaatgtcaaacgcatcttcaatcttctccggtccaaaccctggtttattatatatgatttttggtataatcttcacaacctcttttctcatcctcaaaatcctctccttagcgatcatacccaaaatattcttgagactaaccgttccatttctcatttcattctctggtatgtaaaccgagtacttggtataatcctttggaaaataccaaatatattggttgtaacccgaacctgggctgaagaaaaccggtatacaacccgccagaatcgaatcgaatatcgatctccgagtgtacgaatctcccgaaggttgtaaacagaagacagaattttcaaacaccttcattatcttaaccggattatcgcagtcattaacaaagcagttaagaaagttgcatttaccgtgagatgcaaggcactgctttataatctctcccctaatagatccatccaatttaggtcttggacctccaacaaacgaaaacaaatacttcctcttcacactcttcactttcttctgccatctccaaatctctgttaagctctttggatggaaataagtaggataaggaatcgcaaattcgttagcccaagcagtcgtttcgatacctaacattgtcagattcgagaattcaggtaatagcatcagtttgcttccccaatctgaatcttcatcgtgaaacctcctgaaatcccaaccaatccgtccggtcacaaagaagtgatctcggccgtacatcttcccccattcaggtctctctctcagccattgtgccagctttatcgccaattcgtctctaaccgtcacgttgtatccccagaggtgacggctcacatcaaatcctgcgtagtatgggacatagatcgctgaggctagagaagagttgttggtcaaacactcgtagtgtttcatcctctctcggaagataaccgaaagcaagaattggttcgttgagtaccaagaaccggttttcacggttaagactcgagctgtggttttatcggagaccaaaatctgtggaccgagcccggaattgaccatgaatggacacatatcgaaccatttgatgagtggacgacattctttgatgatgtcgtcgttgaatgtgcttggaagattgtacatgtagatgtatcttccggcgcaagtatccgtttcttcttcctcaagctgtttcgctctgattccatcactctcattcgcatgtttggtgtgatttaggatttgattatttgaagaagcaacgaaggagatgaggaagttgttaacttgatgagtgatttggagatttgcttcgatcaaatctgatttattgatttgaaacagaactaaaagacagaacacaaaggcacttgagatgacaacccaaagctttggaactggtttcatcatcttcatttacttgtgagaaaacattggtattactttttgagatctaaaattaataaatgtaatcttaaggagaagaataattgtattttattctttttaatggcgctttaattgcattttccaaatgaagtaatagatatttgaccatttattatgaatttaattcaatggattatattctaaaaacttctctctgattttataaagtttctatcatggacacgcaaagatgattcccatatgtcaagaagagatctcaactctttcccaactgtattccacagaatttaattggaaaataatatgaataccaggaaacttaataattatatatatttactaaaatattctagaatatagggcaatttctttgtgttctaagagattgcaaatccaaaagtagtgtaaactgattttcatgatatgtttagaggggaagaaaataaacaatttaggttatgaccattttagatcttttgtcttgtgaaaccatttgtctattatatggacggtaagaatattcttttcctttcttggaagatttatataaataacaaaaaaaaaatctataaatcaatattaacctttttcggtacatgtgaataatacaagctaccttcctgaatttattttggtaagaaacataaatttcctcttaatattctgattaggtaagttaagcttttctatctattaatgagagaattttggttctgacaaagatttccagtatcttgtcaattgttttaccacaattagctgacgcgaattctcttagcgaaagtgtaattatttaacagggttcgatatagagaaggttaattttaaaaaaaatgtggaatacatggtttaacttggtttaaacgattactagattactataacatattgggatctaagcgttattcgactgcaagtcaaaattttcatgttgatttttgtttctttaaacataatcgtttccgaacaacatcgattacatcaaaatattaatatagaaactttatgtttcaagatgaaaccaaccaaaaaaaacgacttggaataatatcctaaagatcatctaccagactcaactatgattgaaatcgtaatgaaaactgaaaagcctctaatcttaattagtacataaaaagttgaaaactaatcgtttaaattaataattgttgtgtaaagaaacgaattttcaataattgttgtgtaaagaattacgatgattcattgttcatactctataatttcaataattgttgtgtaaagaaacgaattttcaataccataaatcattactaaactataatacttggcataatcctttgatactttgctttgccaaattagtaccccaaaaaatatctataatacttctaagttatatttccccccccttaatatagttatgtagttgctagatccgtgtcatcttgaacaatgacactctctcaagcaccctagccactgcaatttcaaatgcatcttcaatcttttccggtccaacctcccccggttttgtataaattatctttggtataatcttctcaacctcatttctcatccttgaaatcttctcttcactaacattagccaataacttctcaatactaaccttcccctttttcacaccttcctccgcgatgtaaaccgagtacttggtacgatcttttggaaaataccacttgtactggttatagaccgaatcaacgctaaagaaaaccggtatacaaccggctaaaatcgaatcaaatgttgatctccgagtaggtgtatctcctggtggttgtaaacagaaaaccgaatcttgaaaaacttccactaccttaaccggatcactacagtctttactcgatgtgtcacaatcaagaaatttgcatcttccttgtgatgcaaggcactgtcttataatctcacctctaatagattcctccatttttggccgattagctccgacaaacgagaacaagtatcgtctctgcatcatcgtcacttgcctctgccatctcttaacctcggttcggctctttggatggaaataagttggataaggaaccgcaaactcgttactcctagaatttgtctcaatggataacatagttatgttctcgaattcaggcaaccgcatcagtttgtttccccaatccgaatcttgatctgtaaccctcctgaaatctctaccaacccgtcccgtgacaaagaaatgatctcgtccatacattttcctccactctggtctctccctaagccattgagctagatcttcaccaagttcgtctctcagcttaacgttgtatccccaaaagcgtctcacatcgaatccagcataaaacgggacgaaaaccacggaagaaagggaagaatcgttggtcaaacactcgtagtgtctcattttctctcggaagataacctcaagcatgaattggtttgtgtagtaccaagaaccggtctcgatggttaagactcgagtggtatggttatgatcttcctccaagatacgtggaccgaagccagagttaataaggtacttacatttgtttcgtaattcgatgtatgcctcacagctcttgatcagatcttcgttgaatctgcttggaagattgtgcatatacacgtatcttccggcacaagtatctgttccaccttgtttagttttcacagtgatatttagggtttctttgtcggaaagagagagataggttgcaatttgactgatgtgaagcagaaagagcatggagaacaaaggtgttggtgagatttcagtcaaaacctttagagctcgtttcttcacagtcttttccttttttggattgaatttgtccattttgattatggagaaacgaaagtggtactactttgtgaagataagatacaaaaagataagtgattttacagaaaattaaaagatcattcttctacttggtggggatgtgattcatgtgaatctataatttgttttcaacaacttgttttaaatagaagtactatgactttagtaagtcaaattagtggatatagaaaggaaaaccataaagttatcgtgttttcctatccttttattttcttatctttaacttaaatttatgtatgacaccatcaccatgtgtatgtcatataaaatgacacattccacttgtcctaatattataaaggatatcaaaataatagagaataaattttaacccgcggtgtaccgcgggaacaatttattttttaaataaatattataaaagtttgcaaattgtatctatctataaaatgttttattttatagtttacaattgttattaagtaacgtcctgccaaacccgtcccgccaactcgtcctgtaaaaaaaactcatttattttattaatgttgatcttatttatgatatgtttatgaattattgtctaaatattttgtaattttgtagtaattaaatgctatcaaatatctatgcggcttgatgattataatcatgtcgaaaagcaatatcaaaaatgataattttgtagtaattaaatgatattaaatattttggaagttttattttagtaattaattgtgtagttaaggtagaaagattttgggaagattgttaaatgtcaaatatttaattagaagattttctttctaattatcaaaaacaattattaaatgccagtggtagcgactgtaaataaatctcaactccaggatttatttcacaaagtgactgcaaaaatgtatatataaatggttagtgctattacataatgaaacacgtaagacttgtaaaacctcaaatgttttaaaagaccctatacacttttgacaaagaaaataggaaaaacaaagaccctagagacttttcaattatgactatagaagttaacaaacctaagcaaagtgtttggatataaacatagaggttaaaaaggatttagataatacttagaaaatgtagtttattactatcttgttgtagaagaaatcagatataccagtaccactaaaagacataaaacgacacttaattatttagataatacttaaaaagagaagtacctaatacaagatcgtagttgaacatgaaaccagttgcaaatgacaagaagcagttatctcaaagttcaaagatctgtttttctctctgccttttgtctttcaacagaaaccaataaaaccaacaacaaattcccactaattttaaatgaaataaaatcatgaagcgtattcaaaggcttgtggaggttgtggctcatcatctacggccatagctgaggccggggttccttgtgcagccgctgctgtaccagttgcaggagaagctgttgaagttggtgcgtcggtcagagagagaacctctggctcgtgttcacgcaagtctttgagaagaacgaaacctgacggtgctagcttcactggtacatatctgctgtcatcaagtaactttatgtatttctcttgagctgggactactcgagctgggttcactaaaatctcaaacgctggctcaggctcaggtgctttcttctcgaccgctgctgggctatcgacctgacagttcgtggagacaagactatcaaatcacagatggtccaaacacacaataaacacccagattaaacattcctttagaattcaccaactttgaaattcaaaatgtctaacgtgtgtgattgtaaaacagaataaaccttagaattctagcgattaaaggactaatcaggtaatcaataacagaagctattagaagaggctagaaatgacaacattacctgcatagagtctccttccttctcagttgatgcttttccttttccagatccactttcattgacaggcttttcagggccagatgttttctcagcaatagctttttgctctgcttctttcttagccctagctttggctttaactgaagttgagagaacagcggttggaagtttaacggcggtattggctgtaggaaccgtggtgggttttgggtactcaaataaagacggttttgcatgtgacatgaactcaaactttgggaccttaaggtcatagttcaaaccgatgaaagcggttggtgagaaggccaaactaatgaaatagatcagtgggtaccaataccaaaactggctgaagactgcaaggccgataacagcagtgactttgtcatgtttggtcttagagagcagtcttatagtaacgttcctaccaccagcatcaaggataccagaggccagaatcgctcccatcttgctcattgtatcttcgtgcttgtcaagtataatcttctcaagttggcgcctacaaaacatagaaaaatctcagtctaccaagatattctctacctcccaatgctgaagaaaccagatttatactaacctaaatactccaacacgagaatcgctagcttcgctaatttgaaccatcaccatggccattgcaatcaaagcaccttgacgaacaaagtcaacaacatctgatgtaagtggctccaacaaggatatcgcttcgctgaggccagtgcctgcacaagaaatacccactgcaagagccgcaccatagcgaacatgtggattgtatgactcagaaagcagtgatacaatacggggagtctacaatttagaaaaaaaaacattgtaaaccgttagggaatgtaagcgctcacaaaagtactggaagcgctaaagaaatggaagtcagtggtcacagaaaaggagcatcagaaactgacctgctctggatcagagtacaagacaaatccaagtgccagaacggcagtcctcctaacatcatcactgacatcagatacagcaaagtgcagcaattgtcgaattgccttgttgtttgcggttccactgtaagccaatgccaatgcgtacatgccaccataacgaatgattggatcctgatctctcgtcatctgctcaatcaaggtatctgctccttcttctctaccatatactgtaagagctattcctagagccaatcccctaaaaacgcattccggatgttgattagtgaaatactaaagcaagacaaaatgcacccctcttaaccaaaaatatccttactgtacattaccttattatcttctcatgttgtgtctcatgagcataagcgagcatctcacttgccttttcagtagcagttccaaccaataataaacccatgctgatgccagcagcttcaccagcaactgcactgtcagtataaagcacgcttttgacatcatcatatatctcttcatcagctgtcccgagagctgacaagccaagacctaaacaagctccatgttgaatgacctgcatccatatttttccaataagtattaattaggctgccagggaatatgagagactatattgaagtaagatattaattaatcacctcaacattagtgctgcgtaggctatcacgtagaaattgcttgattccctcgccatggttagcatgaataaggccaagagcatataaagcacctccttcggaataaggactcccaccaccacctgctcctccctgaggcaagtatggagccatcaatgacctaccctgttgcaggtgacctctgtgaataacacctaatcccgcggtagcactgaacttagcccaattggttgccctgcttagccaatcctggcattaaaaaaaaagaatgatgaaagaaagttaaatacactaagccacacagacagttaaactcaaacatacagaaatatttgagtgaaagtaaataatttaccaaattctctctaaggaaagtgtccactgtagttccagcatgcataatggcattagcatatattgtagcactgtggcatacactgttccgcatctctacagactgtttgattgtcttcagtatcagcaggtccgatctacagaaagacaaaattatcaatggagcaaatgattacttcctggaataaacgatttttagaagaaaaaatatcccttgaagatatcaaaactgcaacagtaacttacttgttgtggctgtaaagaaactgcagtgtcagctgaatagatgtctctccagataaaattcccttaatctttgttaacctctcagcatatgtagcatcaactggatccgtctcatgcacaattgtctgagctggagtttcatctgccatctgaacatctcccgaagggttctcattaggagcaatagttgtttcaacagcctgagttgcttctacagcacgtgttttgggagctggaaggcgatctctaacactcaagagaaaggcctggtgctcgttctctacaagatcaaatgcaatttgcaatgccaataaagcatcatccttgttctctgagcgaagaagcttctccaatatgcttgcaacaccttgcggttcatccaaaaacatgaggcattgacaaatgctcaaataatcaggagagggcagcttctggtagacttttacaagtaaactaagcacctgaaagagtagacaagtatgtcatcaccttttttaaataaagactaaactaaacagcctagactaaaagacctagaaaagggagatttttttaattcaggccttgacacatctcagataggtatcacgaaaactgaaacaggacttttggctacagcttaggacatagaggatgctagcatacatgtttgcaggcatggtaatggaagatgcaacatagaaactaaatggtcacattatcttccagatgaggcaaaactatacagttctaatcagtcgatagaattagaacacctttctacttaactattgtctaagaacatcagtctcacctcatgtctgtactctctgcggttgacaaaggaatgagaaacattgatgcaatatgataaagttccctgaacattatcgctcttaatgatagcttcttccaacttatccaatctccggcattctatcgcaatgcccatggcttgttgatacttcccatcactgatgcatctgcagaaggaaaaccatgtaagaagaattgaagcactatgaaaacaagagcattaaatgtataagcattgcatactttccaagcattctttcaacaatcgcctctagcctgggatcaatgtccaccatctcatttgactcaactgcctttgatctgagactggcatattcgtctattgctttggctgaaattttaaaagaagcatctgatgagtatacattcatccagcatttattaaaactcaaatagtcaacttatctgtctttttctagtattatactacttaaaggcagaacaatatctggatgtacaagcttcaagtctacttttaagataataagtcgtgcaggctatataggcttttcttgccttgagagttgagacaagttgatttggtaagcaatttgcattaaacagttaccctagctagagtctacagacagagaacagcatgaagagagtaaaaacatcaacaaacttctcaatcctcacccagaagcgtatgaacataatcagaatcctctgaaacatcaaataagggaccggctcctagggcataagacagcgaatcattaagctcgcccaagtaatagaaaacctgcgataaaacaaccacgatcatcaagaaacccatatcttgtaaaacaaacatataacgtgattagaaaaaggctacgtcccaaaattctaccactatccaccagctcttaaggagaaaaataaccataatgtattcagagcaacaattaaacattcctccactaacatatagcaaatattatccgcaactagacaaaacttaagtttaacaatcgtgaaatcgcaccttagagaccagcaaagcagcaagctgtctttgatgcagatcgaattcttcatcttcatataaactctcactgtaaaaaaaaaaattctctcgagtcaagctgtcaagtagtgcaaatcattaaagagagattatcataaaaccctaagcattgcgccagcacagcctctacaactggaatctataccactagaatgtacgatgataaaccaaaacgaatccaagcctttacattacatgagtaaaagaacataatcatgtccaggaagaagttagatacaattactcattcataatctataaagatcactacagaacttgctaaagctagtcatgtaaaataaaaaactttacttttcttatcctacccattgaatctgcatcgccacaaactatcaatccctcactcaaaattttgaactttaatacccaaatcgagaagacctacacacaaccacagctcaaacaatccaaatcccacaatcttctctagaatatcccgaataaaaaaacagatcaagtgagagaacaaaaccctaaatctcaaaccggaaaaaaagggtttaaaagagaattacatgatggggacactagtggagatctcaggccagaattggtcaaccaaattgttgaggttagagagcgcatgaagcttcaaaacaggatgaggctcgttgagcattgctagtaatcctccagcggaactaaccatgggtgtcgccattgatggagaacactaaatcgaaatcgaaataaaccctaagagaaagctaatcagatgacgaaagattcgaactttcgatgagactcgtcttgaatctctctactggatttgaagaagagtgttttccttatttattttagtttataggacgaaagtaaaaataaaaggagatttgggagaagatagtaagtcagggacttggatgcaaactacgaatatttagagacttacccaacaagtcaggatattaaaaactgccccgaatgtatagctttattatgattttagtctcaagttttgtgttattgagttatggatccaatatattttgaagatttacaaaaactccttattgcttttacaaaattggttggtcatacaattttaagttttaggagcttttaggataccctaattgctaaattatcatcatatcatatcaataaaatgtgttgcaattcagaacataatacaaagctttatagagatatgcaaggcatcatagagaaattaataaacttacagtcggttaatcaaattttataaacaaaattatcataaatcgattcagctcattacacgaaatggtaagcgtaaactatgatgatggtgtggtcgaccattagctcgattatgtaacaaagtcatctagttatttagcttataaatcatttcaagatgtaattcaaaaacatatgcattcaattttttttttagttatctgtttatcgtatcagaagttcaatgaaaatagtgtatgaacaaacaaacacgattttagttatttatatttattgttcattttaaaattatatatatattagttttttttaatgtgtaaattgtatttaatattttcaaagcaacaatttttagtattgaaaaagatttggtggtcctaaaagtataactttttcttttaataacattatttggtactaaaaaacataaagaaaatgatggttctaatcttttggttaacctgcttgtttttctctagagaacatggctaatgtatttttttcattgtcgatggttcaaatttgaaacttctcagacctcttttcgtttacaaggtcagaaattcaccggtcaatctattgattttgaataatatgtacattttatataagctttagaaagaaaaagatttgtgtccctaataaataaggtcagttggtatgaagcagcggcaatttatttttcttatgtagttgtatctactaatataaaactacataaatattacttatgagaaaagaattcatatgtaccataataaaatttattgcacatcattcacctaccgatcttgaatgaaaaaggcagaattagagcgcacaaccgcaacatttgcactgcctacctacctaccccatccactcaaccggaaataacaactactaccaaaccacttaacccatcggttcaacattggcacatatgttttcaaaatcgtacagatgaataccataaggccaaaacagtagagcagcaattaggtacagactatgtgagaacaaactcaaaatcaattttcattaaaccggttttcaaagcttccaaaactcaccaaccgattactttgagaacgaaccaaattaaaccggaatttaactgattcgtcaaatggtctttaactcaacaactctctctcacactcttgtataaagttttgagctttaagtctcagagtcaggttttggtgggttaattctggtagacaagaatcaaacaaacaatgggagacgaagcaaagatcttcactctttcagaagtttcagagcataatcaagctcatgactgttggattgtcatcaatggaaaggtttcattcttctttctccttattctcacctctgaaattagagatctcgtgcttcaaagtttccccttttggtgtttgcatgagattaagcttttgaagtctcagatttctaagtctaaaattatcagatcaaatctttagatgggtagagagagtagaaaatggtgtagttattaagcttatgctgaagatttagctcttttgatctatttatcagctgaaaattttctaattttgattgaagatggagaaatgtagaaatagttcttattgtctttagagtttgtttgatcgacatcaacctttcttgggatggactactgacacttgtcgattagttgtttgccctgaagatcgatcgtttttgtattgtgattattaacttgtgaaggaatctgtagatacatccttgagcctcccttcatagtgaacttgatttttgttttcttcattgattggtttgtgaaatcagtagattatcacaagaaagtaggaaacattaaatgttttggtctgttgttccatcagtagtttatgtttcttattaatattgtcacttaagttcattttttttgggagtttacctctgtgcaacaagtttgctatgtacacagaacaatcctttttatcaagttcagaagatcccaaatgtatctctggacttggttgttggtacagtaatttgtttcaagtattcatctttctattcctattgtttgatttttagagttatatgcaccatatcttgtttagtccaaagaaagcgataacctaagaacttttctttttgttgctccattgtttcttacattttaatcataagcctcagaagtggatcttcccatgttttaaacttcttgatttgacaagaaatcttcaaagttcagaagttctgtaattgggtttcatttgcctctcctaacttcacacatttgcaaaaaaatgcaggtgtacaatgtgaccaagtttcttgaagaccatccaggtggggacgatgttctcttgtcttcaacaggtctgtataaacacaactatcaccatgctcccggcttagtggagatcaatccatcggtttttgattcttattctcttttcaggtaaggatgcaacggatgattttgaggacgtgggtcacagcgagagtgcaagagaaatgatggagcagtactacgtaggagagattgatccaacaacaataccaaagaaagtcaaatacacacctcctaaacagcctcactacaatcaagacaagacctctgaattcataatcaagctcctccagttcctcgtaccccttgccattcttggtttagcagtcggaatccgtatctacaccaaatcagggtaggcttcttttttttctgagcattacttccttatatcttatatatagagagaaagattcaagtcttttgaaaagacaaatctgaaagtctctccctttgttattgtctcttcccatattttgctgtttgaatgtattttggataatttcttatctattgtggtgtaactgcatataaacaacagtcttgttggtgtttttgccttatgcaactaatgaacatctcatctatatttcagattctgaaaccgaagttatgactaataagtgatctgttttgaaagtctggtttagtattgtttgagatctgtagaagaaaagtaaccaaggaactatcaaaacaaggccatgatcttactaattgaatgcttaagagaacacttaattaactttgagaaaaggagaaacaaaaacaacagattacgaattccaaagagaaagagacgtttgttttggcagttacttgatagagtgtgtggcagttagtgacttgagctcacaaaaacatatccacacgaagaatccaaaaactcttctgcaactgtaggaccctctttttgtacctctttaccgctttggccgcaagaagtcgcaaccgcagacacaaagttcgatacttgtaacttcgagagcaataaatttcatttaagtaaagattggaatggattctgtggcaagttgacaactatggactgtttcattcaaaacgttgtcgtgtgtagactcaaatcaatacaatcagaaaacgaatcttatgacaagcaaagacgcgacgaagtttcgatgattgatcaaaagacgatcaccataatgatgatgatgatgatgatatgtagtgagtgggtacgaattacatatttaagataatatagtgggcacaaatctcacagagtggaaagtacaatggactcacacaagagcaagagaaagagaaagagaatctttttctaacacttttgattttagtgagaagacagagacaaaacaaagaccactatgagacactatccatatccataacgaacagcttctctgtctctctattatcagtatacaattgtgtatatatagacatgtattacctacctgtcattgtgatgttatatgtctgaagaacacaacacatggaccataatgatgatgatgataagaacaagaacttaagatgaagagaacaaaaaagagaaggataagtctttattgaaaagagtttgagatcagtacatgtatacacataaaaggatagattttttaaaatggttacaggacaaagagttttaagagaatgcagagtccccctgtaccggaattcataaaagaaaacactgacccttaaaccgaaagaactctaaaccctaaacgctaaaccctaaacagactttgggttacttctaaaaaccttctcttatggctttagtactactactaaggtgatctgtataggcttaaaaaggattggtatcaagttctgttacacaaacccttttcagccacttatgttacagacaccaatttaaaaacactacatgggttttttctcctaagctctttacatgttgaaaaagttaagaaaacggatgatggtaataagatcaaaccgataattagcaggaaaatgttaatatattctgtattaactattaaccccccatttttttgttgtttctaatcatctaccttcgtccattcaaaccgtcctggtagtggttgttcgttcacaggatcaaagttgtacctgaagaaagagttgacagaaaccattagagacacaagaccaaaagagaagaacagaacaaactggaaactcataaccaaaagaacagaacagatgaaacgaggaaacacatacttctcaatgaattgcttctgttgttcttcttcagcacccgagaaaaactcgtccatttcaggtgtagttggtcggcgacgatggctgcgtgacaaactgtcttctctctggttgctttcacttacacaaatgttaagctttgtagacgatcccggggttgtcatgatttcaggccttcttatcaaactgcatggtgtggattcccttgtggtcctgttgaagctgagagtaagtaatatgttactttcatacaatgctctcaaggaaaaagcacataaccgtgtttccttaattagcagcaaaagcaagcaaactttattgcatatagataactaaaactaagcaagtcatgtttaactgaaaaaaggacaaggagaaactccttgttgatttgtggttcaaagttcacaaagcataaaaccaaagaagaaacttccaatgaagattacttcagcaatgcttgaaaagttaatgactcatacaatgttcaacaagatcacgactttagactgaaatcataacatcaaaaaacaaccaaacagcaagaaaaattaaaagacagagaaactagaacttaagatgttacagagacacatcatatactttgcagaatcccaaaaacgaaccaaactttaaagagttacttacagagacatttcaaacacaaatccaacattctttacatgaaagcagataaaaagtctgaagaaaaaacaatagtcactatcaccttcttcaaagtaattgaagaaaaaataaaaactttctcaagaaaaaagaaacacatttttgattaattatatatattttctttcccggaaacagagagaagagtctggtgttgtcagataaagaaaagatggcatcatatcatacacatggtaaaaatatcattaaatttcaaaatcgaaaacgccagtttcaattttaaccaaatacaagacaaaaaattgatccttttttcaaattaacaacggaaattttcaaatccaataccaaagttttctcaagaaacagaacaaattcacacagattcataaaaataagaaatcccccaaaaaattaggttgaaattgatgaagaaagatgatacctttgagtgtgttcttcttcaaggtcgaagaaattttggccaaaggttggatctttattgatttcagaaatcaaatccttgtctttaccaaagacaacactttcagaaacagaatcagacctagacccatcaccacgaatcgaatccaaattactcctagggttagggtttcttccgcatgtctcattcctccgttgctgtttcctccgtttagtagaacgaatcacaacaattggtggtttcttctgaagccgacgactccgtagctgaagatacgaaccacaatcgttcatctgctgctgcttcttcttcatcttctgctttgacggtggattaggagaagcagaagtcggtggtaacgaagaaggagaagagggtttttgaagaagacagcgttgttgttgttgttgaagagctagagatttagctcgagttaaaacaccaagtgaagaagaggaagaaggtgaaacaacatccattaaagcaatagaggattcacctccacctccgcctccacctccaccaccagctccagctccagctccgtcgattttgctctttcttatgtatttccccattttccgttagcttttcatcagagagaaagaaagagagattgggaggtgtgagaaaaatcggagttagggttgtgaagattagtgctctttgtggggtctctctctctctctctctctctctctctctctctctctttttttgtgtgtgttattttttttttcaggtggctgcttcttcactactgtgagtaatgtactttgctattttttcactttagtttttaaaaaaaaaaaatattttagaacttgagtgtaataatttcgatatttataaatagaaatgatgacatatatttttatttataaatttattatttttttccacatttataaattatatttaaaataaaaaaatttgagttagttgggttcaaatatgtgtcacagcgttagaaaagattgaacggttacacaacctgaattaattcaaggatcgtattttgctctacttttgtgtattttacttaccttaggataaaaagttttaaatctagttgaggtagagattggacgaatttggaatgtcaacttctacttctctactaggcttatgatgtttgacaattttatttttattgttttctgcgaattgcttggataatgtagcataagatatttagcctttgtaatattgagaatatactgatgaatctaatgactagattatataaattacaagagttagatgattatgaaagtttaagcagttttgagaattgggaaggagtaggagtattttatatcttatagtattgtataaaggtttgagtaggtatatattatcgattgagaaactaaagataacttaaattaatgattcattcaaccactcaactgttacaaaaaataagttcatgtttaagaaaaaagtacatttattttagaccaaaaaaaaaaaagtacatttattttagtttttccaagttagacgtgtttgtaaattgtaaacaaacacaaacgtaaccgtgctttttacttctccttatgtttcacatttccgttttctatatataatatcgagtttttctttttttttgagttgaaagttaaatttattcaaacccaaaaaaactatttttacaataaatgttacagtgatgctgaaacaaataattttgaaagagaggcagagtcattcaagaaagatgcggttatattagaagttcaataagtaacccagaacaaagacaatttaagcctaagcagataataaactcatccttaatcctaagttttaacgtacgagtactttcaatgtgcatgcttagagttttgtattcatcttaaaccaacttaatgtatgcagtgtcattataagatattcgtaaagagaccttaaaaacaagcgtttggctgattataagaaattattattcaacaatgtagttggtctagagaaattacttacatctctctttcactctaaacactagagatcaaaacaacgaagtaaagaagtaggatcattagacaaagattggaaatatcacaagtctctttgcttttgacataaacaaacccaatttaaaaaaaaaaccaacttattaatgtaacattaaaaaaaaaaaaaaaattagacccaaaaaaagtcctgagctctctgctatttcttcttttttccttttcttttcagacgaacatagaaatatttctacttccaaatctttacggatttgtcatgacttgcagacgcaaccactcccgtcgaaggcgactgagccaaggcagagatcacacactcgtggcctgctaccgtcatacatttgttctccattgtgttccacagctctatagcctgtcacagattcgtttaccaaagttaaaacaactgagagacacattcacctcatcacacatttgaacataagactagatattgtttgacacattatttgtttgagaaatggggatataggttatacctgatagccaccgatgaccaagagatcgggatagctagggtgaaaaacaacagagtggaacttgtttccactgttgctaagctcgtggatgcaatctcctgaactcagtgaccataattttacagcgtcttcactaacagacgccaccaactctccgtttgggctccaacaaacagaatgtacatttgaggaatgtccctgccagatcaaaagtaaataaagccatgagtaacgatcaacacttacgacatctaaacatatgccccaatgcatctaacaagaaaaatgcactggactttgaagattcaaagtattaaaagtaaaaaacaaagcttttagtcttttatgtggattgacccggggaattcaaaaatatcaatatatcatcttcagctctaccttaaaaatgttgacccgtttgttattattttcaatatcaaaaattgacacagtattttctgacgctgcagctaaaaactgtcctgttcttggctggaaacgtacttgcgtgctagccccctgtgcttggaaaattcaacgattagcaaacagagttcacatcccagagaaaccatacaaaaggtcaggggcttgcctttacagcacgaacgcaagaggcgtttatgtcccaaaagcgaatatcattgttgctatcacaggagcataaaagctcggttttcttaggatgaaaatcaatggacataacaggtgcagcatgaccagaaattgttcgtaggaagtaaccaggctgcacaaattggtagtagttagtcacagcagaacacgaaaaattgcaacaaataaaagagaaacaaattaaattagtatacatcagaagcatcccagattttgattgttttgtcgaatgatgacgttgccagttgagttgaattcggtctgaagcgaacatctgtgatgatatgagcatgttcttccggagtgctctcaacttgtagtgtttccatgttccatataaatacctactgacaaaaataaatttgcatccacattatctgtttttaaacaaacaaaatgttacctacctataaatgatctatagctgttttagggccatgacaagtttataagcaaaccgtatctcagaaattaagaagttgcaccttcttatcatgtccagcgctagccaacaacttcccatcatatgagaagctacagcaaatgaccttactggcactttttcttatacaactaacctcattgaaactgaaagctgaaacgagaaaaaggaccgtgttagtatatatttatatcgtctacttgtatcatacttatccttggggtgttagaatacgctttgaggtttcggtatgcacagaagagttccgctttagggtgccaaacaagcttcctccgtctccatcatcttgggacaaaaatgattctacattatcttctagagctcccacatctccaaactggtccatgtcatcctgcagctattaattcttgtcataagaaagctgaaagaaacacggccccatgggatataaaaaaaatattcaagctgctaagaaagcacttgtttcacacaacacaactgcatgctgtatccagatgttattggaggaaaactagattgtcgttatcattcttctgagaaattaagaaacataccagttgatttgctgatgatgcaagaccaccgatcccatcagaaccatacatcattggcccttttggcatgctattcacatggtgcatgttaccagctatagcaactccatcaacaggggtatgcgttgacggagtcgatggctgtgagttggatgggccaacagtgtttcctgtccctgtgctgttagcaggaccagaagaggaaggcccttttcttttgcggttgttctatcagatacacgaaaaggaagttgtggctcaatcatctcagacactaaagaatatattcagttggttaaaaccacatgcttgataagacttgagggattggatccacataaaagtacctgttgtgattgctgggatagtaagtgatcttgttgctgagaagaagattgctgtactggcggcatgctgatatgctatagaccaacaagcaacggaaagagagaaaatcagaagaaaaaaatgtgattgataaaattttagcagtaaagtccccatgtttggtagtaatcagctactaattgcggataagttttctctattattgggttcatgtggttaacaagaaaaaacaaaattctgatacctatgtagatctacattaggataacacaaacacattaccttacacattttccaaatggaaagtatagcagtcagacgataacccaaaagagtacaattttaaagcatagacgagcaattatcagaaaaaatgcatagaaggacagacgtaatgatccaattacaccacttaacggaacacagaaaaaatgagatgcttcattttttctctgctacccgaaaaagatgatataatgcagctcaacagattccactgcatccaacagggatatgcatttattggtaatttgagaaagtcttacctttgacgaacttgactgcatgggggaccctatagatccatcatttgcattttgttggccatctttcggattaaggtttcctctaggtaatcctgtaaatcttcgagggtccatgtcaccaccatacatgggtgaattagtcatatttccttgcgcttgaacctgagccaacatctgatgttgttgctgctgcggcgagagctgaaattgactttgattttgtagaaaagatttctgaacctgagggcctcctaaacctggtcgcatctgctcgatgccctgtaacatttgtcaagaaacttagcaaaatactgggcttggaatgacaaacaaataaattcttagaagaaccacagagacttacagttaatggccatccctttaaaggaagaccactcactccagggtttaatccttcacaagggacaaacacaacaccataagaatttatacaaattgtaagcaaaagattctcgtgatgccattagcatatcaccctatgtaattcatcatgattttgcacataacagggaagtaatatttaaattttggagtccatagtcaactaattgccatagaaggcatactaccacgtattttaccaccattttcttttcggtgagcgattactctacaatgcaatacattgatatatttacctgcactccccatcccaggctttgattgcagaattccctggccataaactgtagaaggatccactggcagttgtcttggagatgtacccaaattaacttcagttttgatttcctgcacgtacaagagattcagatgtacaccaaaatatctgattggagacttgtctgttagaaaatttgaacagtataaagtaaggtgctcgagtagtagttacagtgggctgctgagttcgtgattgaatttgctgcagcgctgccgaaacacctccttgatggtttccttggacaatctgactgtttagggacagaaaaaaaaagaaaggacaacaaggggtcagaggtatgaggactagaaaaacgacagcaaaaaagaagctgagccaatttacccatgatggtttgttgctgatttaagaagggccatccttgcatcaagatgaggttgggatgtctcagaattcataggattaggctgcttcatgcgttcctcgtacattttagcagccaaagcactagcattagactgcccaatcatcccttcagaaccaatagcattcattggaccgccaagagaaggatgattagggtccctacgctgcatttgagcttggcgcatcatctgcagttgctgtatttgcatttgctgctccttcgctttaccttgttgtgcctaaaatttcaaaaccactggtcagttacgtaattcaaaactaacaaaacatattcccagatgttagtagaagacattcacctctatataagctgcagcagcctctgaatgcttctcattcgtccttgcaatgaaaatgtcccaaaacacagaccaccactcaaaaagaaaccctccaggtgcatcaattgctaatcattcacacaacaaaaaacaattacatatcaaaacttaaaattaagaaagaacaaagtggaacaaagaaagtgtaatattaccaactggatcaggagaaaccttcccttcagtcataaacgacttagcagtattatgaagtttcttcttcaccaaataatcatatatgtaaacatcaagcctacaaaaacacaaagatatcaaagtaaggaattgaaaaaaaataagcttttattgaatacaaaattaacttacatcttgtcagcttcccaattactctgagccatagcttcagcccaagatcgagctgctataaaaggaattcaaatcttcaatccaaagaaatgatatgaactcagaataattcgattgttttaataaacagacactaacctgaataaaagcccaaacaaataaatatcaagtagatcagaaccctaattcgatcttcagatatcagtaaatttaaagatcaagcattgctgctacacatacagagaaaatataaagaaatcgacaaggttaaattgcttatacgcgaacatgacttttggaattcgttgaattgatatagaaagtaatcgaattcacatacctgacggatcacaattgaaaaggaaaaaaaagaatctagggttcttgagagattacagtgaattgtaatcagctgtaagttaagagtaaatcgatcatgaaacagctggaagagagagatagatcagattgatgagtttggagagatcatcggatgtttggtttgatgcttagctttaggattcgatgaaaaagtttattcatgggcttcgatatttggacctagttatgggcttacttttgggcctgtgattgacttttaatctaaagtcaactcgaaggtaggccgaaatttctcttgaatcgttagagcagccaattcatggtttctaaacagagtgaaaaaatttattataaaaaaaagtgtaggtttttttattagtaaagaaattattttcaaagtacgcaatgctatgtcaagataaatggttcatacttcatgtagctacactcaataatacattggaaaaaatgtcaaaaaaattgccaactttgaaaaatgggatgaaaaatcaccaactcctgaaatgtcgttttaatcacatacttttgattgagttctttagaaagataacagagcaaagttttgttgattacgaatctttgctttattatctttctggaaaagtcaaccaaaagtatatgatttaaatgacatttcaggagttggcgatttttttgtcccatttttaaaagttggcgatttttttaacatttttcccataatacattcattattctaccgtatttaatcttctagttatagcttacgaatggttcaaaatgaaaacttgcgtcaaatactagttctttctttttgggcaaactcgtgaaatatgtttgtattttgagggtgagatttgaccttataaactgatcactgcatatgttttatgaaactaattcaaattctaaatagaaaataagaactaattaaaatcctttaactagaggtctgtaaccaaaagattgcatgcatattctcaatagaaccaatctaatttttttacaaaaaaaaaatgcataggatattcatttggcacttaatttgaagttttagtactttatgatgtgaaatgaacaatccacacttgtagtgttatgaagtattaaacgtatttcttaaatttcttactaacaagttagccctagattaactagttaaatattcttgttaagcctcgtttttttttcaaatcactagttgactttaaaatttaagtcccaaccattattctaacaacaaacagtccaaattaaataaaagattacattcacagctcaaaccagtcaacctcaaatttttaataatctaaatctatgtgggtgatgcatgtataatgtataagcctatctgtttttctttatttgttagtttggaaaatgaaaggtttaatatgtgtttggtttgagccattaatgacataataaatgagatcacttttttttcactaaatgagatcacatttagggcttgaataatgcaaaagagccctcatattattaatggctttgtagtagacatgtccttcaactataaaaggaaaaataaaacagccacgattataaacttttgtttttttgataacgacacaatttattcatttatggtacgtcttttatgaaaatacactaaaagagaaacacactgttctttttgctataaatccatggaaggttgatttatgaggaatcatatacatatggtgaactgatgattgcattctacgaatatgatcagtctggtttttagaacatgaaccaattattattatttgacaaagtacatgaaccaattgtagtatatattttcatcaatttcaggttttttcaccatcggcgcccactagaatcgtttgctcattttcttaatcggaaataagatatacatttcatttcatgtgcatatatatatacatcgatattatttatttattgaattcatcaaatgtacattgatttcatttttattgttatgttggatgagatcaactgggcagttggcagacataaataaattgtcctatgacaggtgaacctcatttaatttagtttactcaaccaatttatttttttcgccttcttacaagttaatacgtccggtttaatcaattccggtttcccacttttcctcacggttacgccttaaccaagcatttcaacctctgaaatagaataatttgagtatatatgaacaaatcaacaaactaaactaaaccggaattgataagaaacctagaaaaagaagaagcaaaaccggttatgtatgtaacgtactcacgagtggacgatatgtctatatatagaggtcaagactaagcttcactgacacaactactgtcttcgatctctctttcatatacaccatataaaacgaaccagttaattatgggtttaatttccgggaaggtgtgtgtgtttatctttgtattcgctctagtcgctgaattttcgttcggaaatgttgaggttaacgacgacaaacactttttccacaaacctcgtccatttttacacaaacctcgtccattcctccacaagcatggcatttacaagaaaggtttcggtaagggtttgggcggtggaggcggtctaggcggcggaggtggtctaggaggcggtggtggcctaggaggcggtggaggtttaggcggtggtggaggtttaggcggcggtggtggtctaggaggcggtagcggtttgggaggaggagggggtctaggaggcggtagcggtttgggaggaggagggggtctaggaggtggtggtggtggtggtttaggaggaggaggtggattgggtggtggagctggaggaggatacggtggtggtgctggaggaggacttggaggcggaggtggaattggaggaggaggaggctttggcggtggagggggaggaggattcgggggcggagccggtggtggatttggtaaaggcattggtggtggaggaggtcttggaggaggttatgttggtggtggccatcactgatgagtggtgaggctcatgctcatgcattcgtaacgttgttatattatttaattaaatggaaaatgataaattaattattgcaataaaatgatacattagcaattgtgtatgtcgttatttttattttgagtcgcattgtatgctgattccatatgttcggctttggtcggtttcaagtgtggttaataaaatggttattttacttttgccaacagttattgagtggttgtgtttatgttttatatacatgttcactcatctttccatatgatcttacaacacttgctaaaatgaattcggttaggtgaattttatgagtagatacactatgtaaataattagtaaagtaatatgatatttatttatcttttggaaacttttaaaacaccaaacttaatattacatgcattgatagtgatcactgtaaaattttgtactaatctaagttcaaaaagtattacatgagtatgtcttatcccaaatttagtctcaacaattgcaaacttttgagacatatatacagcaaactcttatctcacataaaaaaactttaaagttatgagtaatctaagttatagacttgtagtgctactctagctaaattaaattcattaattctggagcataaagaaatctgaaaaataaccatcttctcgatcatgtcctttgcttagcataatatttcttgttcggtttagcgatctcctaaaatgcaacgtggtcactttgccacatcactttgaagatgaacaatctacaagctgacaaacgtatctaatgtgtttgtccgtatgttaagtttatttctgtaattttgaacacatgtgagaattttcaaactgatttaattccgattccaagctatacgtaagaaatttcaactaacgtggattacatacttttctttgagtccgaatacaaagacttcacattctattttgttttcttctttcgaaaccactaagggctactaacctctcgaatcgacaaacgtatccaatgtgtctgtcgttatgctacgtttatatctgtaattctgaacatatgtgagaagagaaattatcaacggatgcatgtgattccaatcccaagttatacgttaagggattttaagtaacgtagaaatcacttcatgatttgagtggcccttagctgcttgaccatacttttgttctagcccgaatacaaaagacttcacgtatagctttaacattttctgagtcaaattgtgcaaaaccacatatctgtatttatacccttcttctctctcacatttcttaatccaaaatcattcttctaaaagatatttcaagacaaccatgtcaaaggcgcttttgcatttgcattttctttctctgtttttactctgttgtgtctgccattcaagtatttttactttaaattttcattttactggtattgtggcctgtcgtccccaccagattcaagccttcacgaagttcacgaacgagtttgacacccgcggttgcaacaacagtgacacctttaatggagtctggtgcgataactcgacgggtgcggtcgcagtgctacaactaaggaagtgtctcagtggaactttgaagtccaacagtagcctcttcgggtttcatcaactccgttacgttgatctccaaaacaacaacttaacctcctcttcactcccttccgggtttggaaatctcaaaagattagagggcttgtttctttcctctaatggcttcctcggccaagttccttcctcattcagtaacctaacaatgcttgctcaattagacctttcttataacaagctcactggtagtttcccacttgtccggggtctaagaaagctcattgttttagacctttcatataatcacttctccggaactctgaatccaaacagtagcctctttgagttgcaccagctacgttaccttaatctcgcttttaacaactttagttcctcactcccttccaaatttggcaatctccatagattagagaacttgattctttcctctaatggcttttctggtcaagttccttccacaattagtaacctgacccggttaactaagttgtaccttgaccaaaacaagctcactagtagtttcccacttgtacagaatctaaccaacctctacgaattagacctttcatataataagttctttggagtcatcccttcttctctcctcactctgcctttcttagcacatcttgctctacgtgaaaacaatcttgctggttctgttgaagtttcaaactcctctacctcatctaggctcgaaatcatgtatctcgggtctaaccattttgaaggacaaatcctagagcctatctcaaagctcatcaacctcaagcatcttgacctttctttcctaaacacaagctacccaatagacttaaaactcttctcctccctcaaatctttgcggtctctggatctttctggaaacagtatatcttcggccagtttaagttcagattcatacatcccgttgaccctggaaatgttgaccttgaggcactgtgacatcaacgagttccccaacatcttaaagaccctcaaggagttggtgtatatagacatatccaacaacagaatgaaagggaagatccctgagtggttatggagcctacctcttctacagtcagtaactcttggaaataattatttcacaggtttccaaggttcggcggagattttagtaaattcatcagtgctgctattatatttggattcaaacaattttgaaggagcacttcctgatctaccactctctatcaaaggcttcggtgtggctagtaatagtttcacaagtgagatacctctttcaatctgcaaccgaagctctctcgctgctattgatctatcctacaacaacttcactggtcccattcctccatgtttgcgtaatttggaacttgtgtatctccggaacaacaacctggaaggaagtatccctgacgcgctctgtgatggtgcctctttacggacactcgatgttagccataaccgattaacagggaagcttccaaggtcttttgtaaactgctcatcgctaaagtttctaagcgttataaacaacagaattgaagatacgtttccgttctggctcaaagctttaccgaatttgcaagtccttactcttcgctcaaacagattttatggtcctatatctcctccgcatcaaggtcctctcgggtttccagagctgcggatatttgaaatatctgacaataagtttacaggaagcttgccaccaaactactttgtgaactggaaagcatcatcacgcacgatgaatcaagatgggggtttatatatggtatacgaggagaagctgttcgacgaaggcggctatggttatacagatgctttagatttgcaatacaaaggtctacacatggagcaagctaaggccctcacttcctacgccgccattgatttttctggaaatagactcgaaggacagattcctgaatctattggtctcttgaaggcactgattgcagtcaatatatcaaacaacgccttcacaggccatattcccctgtctatggccaatcttgagaatctcgagtcactagacatgtcaagaaaccaactctcggggactattcctaatggactagggagcatttcgtttttggcgtacatcaacgtgtctcacaaccaactcacgggtgaaataccacaaggaacacagattactgggcaatctaaatcttccttcgaagggaatgcagggctttgtggtcttcctctcaaggaaagttgcttcggcactggtgcacctccgatgtatcaccaaaagcaagaagacaaagaagaagaagaagaagaagaagaagaagaagaagaagtgttgaacgggagagcagtggcaatagggtatggatctggattattgcttggattggcaatagcacaagttattgcttcatacaaaccggagtggcttgtcaagataattggtctgaataaacgcagaaagcgttaggactgttttagtttgagtttgatccctcaatgtctgtcaagtagttgttggtcttgtattgaagcattctctggagtcataatatacatctcagctttttctaatgagaaaaacagcagaggcgggcaaatgaggataaaattggggtctatactgaattagtttgatttcacacattaggacaatacaaaaaaactgtaacagagggatcatggtttcattcatttggttagcatcaacaagaggaaaaaataaaaagtaaagagattgaagaaaacagcaaaaactcaacattagattttagattacagaaaacatatcatcaccatgagagcagaaagacctaatttctatataagcaaaccccagcagcttacatctatttcagacaagcataccctaaaagtatcatttctcagaactaagttatcatatttcgttcctaacaaaatcaaatggaaaagtatatatgtaaagagtgacctcgaacacaggaagaaaaagaagggcatataccgggagaagttccaatgagcttagtagagcaatatggggctggtaatctcgcaacgtattcttcttattctttcaagttttaggtacacttgaatcccccgcaaacagagaggatgatgatgagaatcaaggtaatgatgataccgaggactatgagcttaatcttcatgttttcaaaccacatctttcttcttatttttgttccttgtgttctgaaatcttgtgcctgtagatatttgaattggaatataaaagtctgaaaactggaaagccatttcatgcttatgcgcttatatgtatacacgtataatattcagacaaatatgagtgaaaaggtaagtagtaaacctgtgaacgaaggttctcagttttgtcaactagaagctcaattttctcaccacggtcaaggacctgccaaagaatgaattacatgaaactcattcagtttcgttaagggcatagaaagttcaagccagatatgacaaatatactcaaattaacgacacagaattgtgagattggcatggatatacaattcagaccttctcaatgttctccatcataacacccttcacctcagtaacctgagccttaactttggcaagtttgctaatctcgtcaggatgatccacacagtactgcatgtgctccttcagtttcgacctgtggtacaaccaaagtttaaatcatatccacagaaatttaacgtagaaatttttgttttctcattctaatggcagagcttatagtacccaaactctctgtttaagctgttggcttgagcagtggtagccttaccaccaccatatctcttgttgaaatcttccttaactctctccaagaaagccataggaatctgcctcccaacagattcaacagcaacaacacaatacgctgcataacaacaattttatcagatccatcaaagcaattattacttcattgccaaaagtagatatagcaatgcaacttctgaattccatcattgcaaaaaaaaaaaatagagatcaagatagacattgattaaaccgaaacttattgtaacgcgagtttcaagcttagagagaatcatatatagagatcgagaagaagagactcactgaagccattctcgacgaggtaattgaacgtgtgtccgtcgcaattgtatgtaaacttgttattcgaagaaggaagcttttggagacactgtgcagcgacggcagtgaaatttcctttgaattctgtatactcgacgagaatcaccgtaccacgagcgacgaagctgtagatcaaattttgttgtcccattgttctcgtgacccgaagaaggaagaaaaaccaaacgcaaccacgaattcgattttttgaattccaccaaagagagagagagacaacagttttttgttgtttgtttgggtttgtgtgtacggaagtaagaaagatccaaaatacaaggagaaattgaaagggagcgagagatatagggacgacgctgcgatccatttttctcctttctatcaacgtttttttttcaaaaattaattgcgttatttaattctagttaattactttaactatttaatgtttctgttttctaaaagtaccagtttcggaataatggttcatgaattttaaggttgttaaatatgaaacaatcagaaatttttcgctatttgtttatatgtaaccatatatagcagtgtggatgcttaaagtttgaatttatgattttgactaagaccaaattatttctaatagtatgaactctatctgcggatttgtttcttattaaaaaaaataatagtttgcgtcaactatagtagtactattcatcttttgtttgtttctatagaagcaaaatctatgaaccatggagatggaggtcaaaatggtgttaaaaaatagttgaccattgcatgccattagccaataggtctgtgatcatggttgatacatttatatttgaccattactgtttctacctctaatgaacgtttgtgatttgaggtacattggaagagagaagctacacagctatctcacaaattagcaatctaaaagtcgactgaataacaaaaaagttgctttatatatacttgtaagattaggtgaacaataattaagttataagattagggccggtatatgagattaggtgaacaataattaagttatacaaaaagtaatcgaataactaatcttcttaaaaggatcagtcattaatcgtggaagatagaatggacctaatgactaaggggagatgttttttttttttttccatcaagaggagatgtttaaaggtatggcatatactccctttgcaactagttacgtacgtgggaatgtatcatatgttgaccagaaaaaatgtcaatcgctgactgtgtaacacttcagttgaaactaaagatcaaaaaggaaaataaattaaatgattcaagctacgtcatcgaaagaaatgtaagttttttttaataatatgtgtagtacaaaatataagtataactttcatcgtgtaccaaaaggtccaaaaccgtatcacatatctttgtattcttctatcgaattataataaaatcatttttttaagtgaaaagaaaaactgccacgcaatctgtcatgaaaacttatgagagttttaagaagtcaagccacgtgaaattttcgtagcatcctataaagacaatttaaatgtccacatgatacaaaatcatgttagtacgttaccctatcatttatctctttaaatttaaataaaaatagtaaagttttccaaaatagcaaaaaacttcaattttacccacataactcatacatcctcttgttatattcttaaataacatgtttcttttctttgcattgaaatatgcaactagttatgtggaaacgttcctgctaatgctatattcaaatttccattacttcatttgctatgctcactatatcacaatttagtctgaacaaagacaccaagaaagacagaaattacattatttaattctcgaatccagggaccgcgtaaagaaatataagcccatgtctctttttttttctttcttaagttttgttttgtatgacttttttgagtttcaagaactcaagccacgcgaaagccgtcattctttacaacttgtgtgactatataacaaagccacaaggaattgatgattcacatgcgaaagcaaaatatccattgcaatattctaaaaattttcacacttatccatccaaatgtcaaatttgcgtttgcgtttactttctctcgtgtccatcctctactgcatcgctgctctccgatgtcgtccagaccaaaccgaaaccattaaacgtttcaaaaacgagtttgcgttctctagcatctgcagaaatgacaccaacttctttagcggtgtggtctgcgataacacgaccggtgcggtcacggttctagaactccccggtggatgtttacgtggcactctcagaccaaacagtagcctctttgagctaagtcatctccgttacctaaacctctctttcaacaacttcgattcttctcccttgtcctctgcttttggtcagctcaacaatctagaggtcttgcttctatcctctaatggcttcactggccaagttccttcttctatacgtaacctaaccaaacttacccaattaaatcttccccacaacaagctcaccggtgatttaccctcacttgtacagaatctaaccaagcttttagctttagacctttcttataatcaattctctggaaccataccttcttcttttttcaccatgcctttcttgtcttatcttgatttaagtgagaatcatctcactggctcatttgaaatctctaattcttcgtctaaacttgagaacttaaatcttgggaataaccattttgaaacagagatcatagatcctgttttgaggttagttaatctcaggtatctaagcctctctttcctaaacacaagccacccaattgacttatcaattttctctcctctccagtctttgacacaccttgatcttcacggcaacagtttaacactaacgagtgtgtattcagacattgactttccaaagaacatggagatcttgctcttgtctggatgcaacatcagtgaattccccagattcttaaagtccttaaagaagttatggtatttagatctttccagcaacagaatcaaaggaaacgttcctgattggatatggagtcttcctcttttagtctctctggatcttagtaacaattcattcaccggtttcaacggttcattggatcatgttttagccaactcatcggtccaagtactagatattgctttaaactctttcaaaggatcattccctaatccaccggtctctatcatcaacttgtctgcttggaacaatagtttcacaggagacattcctctctcggtctgtaacagaacctctcttgatgttcttgatctgtcctacaacaacttcactggctcaattcctccatgtatgggtaatttcaccatagtgaatctccggaagaacaagttggaaggaaacattccagacgagttttatagcggtgctttgacgcagacacttgatgttggatacaatcaactaaccggagaacttccaagatctctcctgaattgctcattcataaggtttcttagtgtggatcacaacagaatcaatgattcatttcccttgtggctcaaggcattgcccaatttgaaagtccttactctccgttcaaacagtttccatggtcctatgtctccaccagatgatcaaagttctcttgcatttcccaagctccagatacttgaaatatcgcataacagatttacgggaagcttaccaacgaattactttgcgaattggagtgtaaaatctctcaagatgtatgatgaagagaggctatatatgggagactattcgagtgatcggtttgtttatgaagatactttggatttgcaatacaaaggtctatacatggagcaaggcaaggttcttactttctactccgccattgatttctctggcaacaagcttgaaggagagattccagaatctattggtcttttgaaaacattgattgctctcaacttatcaaacaactcattcactggacatattccgatgtctttcgctaatgtgacagagctcgagtcattggacttgtcagggaacaaactctcgggggaaattccacaagaactcggaagactatcgtatttagcgtacatagatgtctctgataatcaactcactggtaaaataccacaaggaacacaaatcatagggcagcctaaatcctcatttgaaggaaattcagggttatgtggtcttcctcttgaagaaagctgtttaagagaagacgcaccatcgacacaagagcccgaagaagaagaagaagaaatattggagtggagagcagcggcaatagggtatggaccaggggtgttgtttggattggcaattggacatgttgttgctttgtacaagccagggtggttcatcaagaataatggtcagaataggcttagaggcatcagacacccttaggattaaaattgttctgtttcattttttttttgtaaattgatcaatgagtaagtaaagttactcaaaaacagaattatggcatgttctgtttacatttaaactatgatcttataacagaagagccgaaactattaaattagtttcttccatatcaaacaacgtattcatgactacttcattttattatggaaacataagaaacagaacaagtatttctttacatgtgaaattttttgagtaacgaaaacatatgttacatttgttgggtaagggtagttcgtcctttaaggataacaaattattaggcggcttaatttagagcccaggagtgtaaaaattgtaatctcaccgactctcattaatttaatcgcaaaataaaatcaatttccctatgaagaaaaggaaaacctgaataccttcgttccttgactacaaagctaacctttttctctttcgctagaactcgagtttccttctaggttttataatttccggttctgtatcttcaagagacttgatcaagatgatgaaatctgatgatcgtagtttttccaagcagagatgtttgacgagattacgtgaaattcttcagaagccccaaacctttggtcgctttgaggtggaacaaatttcgagacgtcagtgggatgtgcacaaagagtacggtactaacgaagacaaaagctttaaactgttgaatccgcccgtcatgtcgttagagtacgagactaagaaagacaaatcgaaaaagaaggaacctagggttaactcagggcgggttaatatgcaggagttgatgtacgaagttgtcgcagagttgccgcttgacagcctcttagaacgtagatcaattacttccgtactagaaaaccctaatccggattcacagtcgtctatgtcatcttgtgtcagtcagtccaagaaaaaacgttgttctgttaaggtggaagagagacgtcccaagaaaggcaaagtcgttagtcctttagaggtgcaaccaaattcaaacgactccacccgattggcttttgaacgttatgaggaacgagaatggctacaatccgaagctgatctcaacgagggaattgtttaagtctgatctcgataaaggtaaagcacgtctccaagtcccttttaaccaagtgaaaactccggactttttgacagaggacgagacaagaatcatacatgaaaatgccatgaagattcgtgacgatggtgtgcctgtgaatttggtggatcctcggatgaataagcatgcgcttgagttgaggaagtggaagatgaagggaaactggaattatgtctttgttaaaggttggaacgatgtgcttgatgctaacaagtcgaattcgtttaaggaaaaagacgtctttcctctctggtctttccgatctggaacaggcaaactctgttttgctctcaccccaaaaattccagcaacggctctacttcaggagaatctggcagtggcggcgatggtgcttctacttgaggtgaatctggtcaggtaccgttacccattccttcggcagtagattctagccactctggccaaggctgttcaggagagagcagctctagttcttcctaatcataactctgcttattgcttaagccacaagtaaaacggatttagttttcaggcaaatctggcttggttttctttcttttttttgttcagttgatgaaatagtggggttttgtccaaatatgatgttttgatttgagtttctttctttatgtttgatttttttttatctctctctgatgctgcctatgtttacttatgattagcattgaaaatgcagaacaaaggagagagaacttgttttcttatattatcacaaaaagatccatcaggctacaacaacacacaacaagtgtaaagtttcttggctctactaaaaactcaaaagtctaagttggatcaatcatcaccataggccttgaaacaataccgctcaatataaggagcgttaaagaaaagatcagcttccaaccatttcggataccgaacaagatctccagctaaaaactgcatatacctcttgcttccttcgggaactactcgaacctctccttgttcaatgtaaaccaactgatccacctgccaatcccatggcaatttgcatttccctgtcttccaaactgaccatctcgaaaccccgagttcctccaaccgtttctgtgaaactttccgttccactttaacattgtatagctcctctaatggtttctctgtctgcatacaagtcaccttaaaggctctctgaacagacaggttatttgtcttcttacatgcagtgacagaacctgggaatggtgtagtcattatcagacttgccatggctgcttctatccaatcttgtgaaacctgagatccacaatgaactttaaataacacatatcgaaattctttgtgatgtgttaaagtcttgtaactcctgaaacagagaaagaaggtgaatttctaaactctagtgtgtaaaagtgaattatattgtaaagctgaaggctttatcatttactctctttgcaatagcttatatgaatcaatgacacagcgtaacacaaaaactcacaattcaggaaattagctaatgcccatttgctatttcgattggaaaagtgaaaactcatcgcaaaattgaagatatacgaatttaacccaacaagtccgcaaaaaaaggttgtcgatttcaaaaccaaaaaaaaaagcggaagacagattatacgcatcgaaatcgaatttcttaccagcggaagtgtgagtgagagtaacccttaaaccctgaagcagtcaggcttatccgatccccgatttgatgaatcagtaaaaaagaagaagaggatataataaatattacagaaacgatactaacatttagatttgttttaattttagaacagaagtttgttttgagttaatgtaacccaaaatgtttttgttttgtaagactgtaaacgtgtcacattctctgacacattgcacaatctttccagttttctcttcacaagttttatctctgtttatcaaaagttcgctcttggttttatagcatttgttttggaactcattgtcatggtggttctgcaaattcatcagttcaatgggttcgttagttccgtatcaagggctcagacaaaccaaggaagaaggagagcttcgacgacagtgtgcgttcaaacacaattggctccctctcttacacaggtcaagctttctgctcaattacgcatcctctggggggaaatgagaaaaagttgtgaactttatcaggattagagatgattttgtggtctgcattgtgatgaaagtttgctcttgataactgataattgattttcattgcacaggaaaagaaattttcatcgcttttgttctttcttagttgttttagtatttgaatcttgagagcctttaagcgagattgcataagcatgtttaacttcacgatgagttgtttttagctgagtatgagttcaatcatttcgatatgcagaagataatggagagtatttcagttggtggagaagctggaggtgctggtggtgcttactcttataatgccttgaagagacttgacaatatttggtccaacatatgtactcaaccaacaggtaataagaacaatagtcttttggtaaccattcagataattaagaaatatgcttctcttggtgatgaatgttagtctttgcaggaccacaagaaactcagcaaattgtttctagggtatctggtttttctcaagattatagtatggggaataatctcgttggaacctttgacatagtggtttgtgggggtactttggggatttttctagccacggctctatgtgccaagggtttaagagtcgctgtggtggagagaaatgcaatcaaaggggtaaagcttctagttaatgctgtggttgaggtctggttggagaagctattgttaaagctttttggttttgtggtgatttagagagatcaagaatggaatatctcaagaaaagagatgaaagaactgactgaagtcagagttttaaccgaagatgagatcgaagaagtaattgctgcaaagttcaatccggtaaagcttctcttcagtaagcaatatcttgatgctttataaaagtcatgtagcttaaggttatcttgaacaaatgcagaacagatgtggatttgagaatcttggtgatatatgggttgaagatattcttaacctcggcgtttcgtgagtcctgtcttctcttattctctaatacataggaaaagaataatccccttgtgttctgctactttctgaaagtgatgatttgtttgttttttcgttttgtatgttaaaacagcccagccaaacttgtggaaactgtaaaacaacgtttcatttctcttggtggagtcattttagaagactccagcctctcgagcatcgtcatctacaatgatttagctgtgagttatctggcgttttctccaaaaacattgtacctaagaagagtattcagcttattgatatgaattgtttgaacattttgattgacaggttatgcaactttctaaaggtgacacattatcttcccgtctcgttattgatgccatgggaaacttttctcctattctgaagcaggtcatatcttggcctaagaacatatctacttttacattttcatttgcattagttatggtggtaaaaaaataaaacttactgattcgcttttcttgagcaaattgtgtattgcccttgcataatacttttcttgttatgtattctgctacaaaagatcaaacgtggtagaaagccagatggaatgtgccttgttgttggatcttgtgctcatgggtttaaagagaactcatcaagcgacgttatatatagcagttcatcggtgaccagagttgcagattccaatgtacaactcttttgggaggtaaaaaaatctgtccccattctaacacaattcccataaccacaaagaaatggttttaatataaggatgcttattgttgctttaaggctttcccggctggctctggtccattagaccgcactacttacatgttcacttacactgaaccgcaatcaacatctccgagtttagaggatttactcgaagaatactggaaactgatgccaaaataccaagtgagtttccttccatcttatatcacaatctttcatcaactttcgttttttctttcttttcctgatgtcttttggcaaagggagtctctcttgatgaattggaaatactgagagttgtatacggaatctttcctacataccgaaataggtacgactttgacaagaaactccgttgatgcctgtatctctatatctatcatctctggaagtttgaaattctatcattgatattataattctgtttaccagtttcgtacaataatactgctgcattctgacatatctaaccctgttggattggacttgtcaccagtccgttgccagctgcatttgatcgtgttctacaggttggtttggttcatttatatataagcttccaagataagtttgcggattgataatttgataaactaaataatcaaagttacttacaaattttttactcagtttggtgatgctagcggtattcaatcacctgtttcatttgggggttttggaagtttgaccagacaccttggaagattgtccaatggtatatacactcactctctgagagtacacttgctgtctccatatctcattgaacattatacaactttttatatcatgaactctttcagaatattcagattttctgacaatcttattgttcaacttaaaaaaggaatctatgacgcaatagatggagatcttctggactctgacagcttatcaaagctaaatccttatatggtaatatagctttgtggttctcagctaaatatctttctccctgctattaacttcactgaatccatttggcttttgaacgacagccaaacttgagcgcatcatggctgtttcaaagagcaatgtctgcaaagcaacagctcgatgtttcccgtggcttcaccaatgagcttctccatgtaaatttcagttgcatgcaggtatagtacacttttctaaaccgggaaatgagagtttcgaactttggcttctaagtaatggtttcatatttctcttgtagagattgggcgatccagttctcagaccatttcttcaggatataatacagtttggtcctctagcaaagacattaggccttgtcatgctgaccaaacctcagataattccgtcaatattcagacaggtatagctctcctttgataatcgttgcatcatttttgaaccagaaaacggaaacaaaagattgaaaatgttcttggtttattcatgaaatcttcgtttctttggtgattctcctcaggttgggatacctgttctgcttgattggtctgttcattttttcatgctgggcttgtatacgctcctctcggcatacatcgatccattgctaaggtgaaacatttctgaatctctttaagaaattatgtatggattgttgcttctgttgccatgactctgccacattatggatgtcgtgtttcttgaactttcttgatatttttgtgtattctcaggccgtctttggaaggacttccctcaaagacgaggttcgagtggaagagatgtctcgaggcctggaaatatggagctggcctcgattatgagttgtgattctgttcgtatttctgaagaatggtaccctcatcgtcactggctttttgaaagaataaaagttcatcagatatcaacatctagtacttcataagcttcataaatgtctggctcatatacacagaatcaacatctcaatccttagatttgattcacagggttctagaaaactccttcaatatcagtttatacacacctacattcgaaaagctttgttctatgaacagacaaatttatagtaatttaatacaccaaaagcgtcgagctttgttttctttaccgcgtagacatcaatggtggcttgattgatccattgtggataccaaatgatcatactccagcaaagtttgatacataccctgtcccaactagctcaaagaatctttcagaaaataaatggttctgttcaagtaaccgattttaaccattaacaggtagagatttcaggggttaccagctcatacaggtctttgtttgacgaatatgttttaagtctcaggtgaatgcatacttccaatgagtgcagtataaaccttattatctattgtataccctttccttttcatctcatcgtacaatccaaaggcttcgtctgattttccagctttggacaaacccgagatcatcaccgtgtacgtaacagaattc

SEQ ID NO: 322 - DNA, 96801 bp, Arabidopsis thaliana
aagcttccagtaaagctgttatctgacaattcaagtatccgcagctcgggaaacgcgagaggacctcgatcaggaggagagagatggccgaagaatctgtttgaacggagagtcaagacatgcaaattgggtagcgccttcagccagaaaggaaacgtgtcttcaattctgttgttgtcaacactcagaaacctcagagaggagcaattcaaaagtgattttggaagcttcccggttagtcgattatagccaacgtcaagcgtctgtgtcttagcaccgctatggaactcgtcaggtatacttccttccaagctgttcttcctgaggtttactacttttaagttactcagacattgaggaattggaccggtgaatttgttgtaggatagatcaaggacgatgagagagcttcggttgcagattgagagaggtatgttccctgtgaaactattgttccacgcagacaagtagatcgaaccgagtggtggagtaggaaacgctcctgtcatggagttataggcaaaatctagtaactgcactgatgagttaagtaaaacttctgaagaaccttcgaaaccagtcaaagaattgttaacaagatttgctatgctaagacgaggaagcttccaaaaccactcaggtactttccctttgattagattgttggaaatgtctatatgctccaagttttgaagggtcttaaagatgtttggaaactcgataatgtcgcactggatcaaaatcaagcttattaagctcaatggaaactctgaatctgaacttaaactggctggtaataacctattttgacgaatatcaaagaccaacaaagatttgagaggagcgaagacgcgtaagtcaattgggtgacttatgtttagggaagcaagttcaagatggttgaggtttatgagctttgagataggctctatgatttttccttcaaattggttaaacccaagggacaaacgaactagcttagatgaagaagaagagtttgggacatcaatagaaccagtgagatgattctttttcagatcaagataagacaagaaaggcaaagtgggtagtaaatcaaaaggtatggctcctgagaattgattgtaagaaaggtctaaaaaggaaagctttgttaggtttcttacaggtgggaaactaccagtgagctcattatgggaaaggtttaaatgggtaagcaagataaggttactaattgaggaaggaacttgaccagtaaagctactagaggcaagagacaaaacctctaatctggtgagattgctgaattcagaagggagtgaagaggaagtgaagttgttgtgagagagattaaggtaacgaagctgatgcaactcaaagagactactgtttggtttgagagttccagtgaagcaaccacttgggagctgaagcttcgtgaccgcaccagtcgtgttatcacactggactccgtttaagtagtcactgcggttgcagccgtcagattcaaactcattcttgaattggattagagcttggatctggtcaggaagacaagcaagagcgtcggtcgtcaagaagcttgaaacgaagacgatacagtagagtaagagtagcgagcaaaaatgcaaacgcatggtgtttgtgattgaaccaacaagttgaggaaattattgaacccaaaaaaagacatatcaaagatttgctatatatatgttattttaagccgcctttactaaatatgtggggtttaaatgtcacgtgaaatgtctacgagtcacatttgttcatgaagtaaattccacgtggacatctctgactatataactgggagttatagttgactgttaaaattggcttcaaaatttagcaacaagaggaaatcaacactcagcaatttactctcattggatcaaatgaacgcacattaatatgacgtaacgatgatgacaattctgtttaatagtatcttattgtttacagatacagaaaaataaattaagtgggcctttcaataattaataggttggtgaaatgttaccttctcttgatatttttttaattttcatttattatgagtatgttgcgttatgaaacaactcgcattaatttggttatagattggagaaagaagaagtcatggtcaaaactcaaaaatgtaaaaggaaacaagacgtgtatgacgacgtgattgataatctgaggagatacctttgggccttataagatgggccgaaaaagtaatagtattagcctctattcggcccgattaatttcaggggaaattttggtaataaagtggaaacgacgtcgtgacaaaactactgtgtagactgagaaataaagaagcccttgattttgcccattgcagtcatctctctcgaatctctctctataatccgatctgagaaatttcgccggagctaggttttgttgtttaccgatcaatcctttaatcaatggcaatggctgttttccgtcgcgaagggaggcgtctcctcccttcaatcgccgctcgcccaatcgctgctatccgatctcctctctcttctgaccagtgagatctctttctcattcatcttatccttgcgtataaacacacatttcgctgttcctctgtgatgcttttctgaatttgaaatcgtttgatttaattgagtcgttgatgttttcatttccttgaaattcgaatcgacgaaaatttatggaaattgtgttgtttgactcgggagctgctaatgagtgaggtgtttttgttcgtctatttggagttttgagactcggaaatgtcctgttaagctcgtttcgttgaatttcctattgcaagaccaatttgattttcctcgtagaagagactttgtgatatgttgtctaagctcgtcagatttaatcagcttttacctgcaaaactttgtgatatttaggatgatgaggactaaacttgtatttgatttgtagggaggaaggacttcttggagttcgatctatctcaactcaagtgggtaagtcaaagctgataattggagattggttttacctagttaggattgtgttctaagaaatctgtgatgttctaatctttatgaattgctttacatgtattctctgtgcagtgcgtaaccgcatgaagagtgttaagaacatccaaaagatcacaaaggcaatgaagatggttgctgcttccaagcttagagcagttcaaggccgagctgagaactcccgtggactttggcagccatttactgcacttctaggagataatcccagtatggttggctatatagagttgtttttcttaataactttgttctagtatcactccgggcttgcatcggtattgaatattgatgacgacgaacaatctgttgctcttactatagtctgagatatccatcctcttgctatctcttgttgttattgtggatgtgtttctgatttctagcgttacttgatggaaaaaccaggcattgatgtaaagaagagtgtggtggtcactctctcttctgacaagggtctctgtggtggaatcaactccactgtcgttaaagtgagcagggctctgtacaaattgaatgctggtatgtttgaaaacactacgatggttccgtggtttagttttcctgaattgcatatccgatattaattcttatatcattgcaggtcctgaaaaggaagttcagtttgttattgtcggagagaaagcaaaggctataatgtttcgtgactcaaagaacgacattgtcctctctgtaacagagctgaataagaacccactcaattatgctcaggtagttcttagttgctaatagttaggagcaatagtttctctccccgatccatttgttctcgagctatttattgttgtctatagtgtttcttatgtttacttgctgcttcaggtgtcagttctagctgatgacatcctgaagaacgttgaatttgatgctttgcgcattgtctacaacaagttccattcagttgtcgcatttctgccaactgtgtccactgttttgtcacctgaggtaagtcataactgttgaacgtctcaatttgtgcttaatatttcacattctgctttaagtataaacttgattgtatatgtgtgtgttttgcattgaaagattattgagaaggagtctgaaattggaggaaaacttggcgagcttgactcatatgagattgaaggtggggaaacaaagggagaaatattgcagaatctggccgagttccaattctcttgtgtaagtaaccaagaaagtttaacttgatttatggtatttcagcatagaaagaaacataacattttggttgtttacgtaaattctactaggtgatgttcaatgcggttctggagaatgcatgtagtgagatgggagcaagaatgtctgccatggacagctcaagcagaaacgcaggagaaatgctcgaccgtctcaccctcacatacaacaggactcgtcaagcttctattacaacagagcttattgagattatctctggagcttctgctcttgaagctgctaaataagcccatccgtgttagttctcttttcttcgctttgatatttacccccaccttgaaggagaagagtgtgttaaaattttactgaatcagtttcctttgctggcttcttgttgagacctaccaatgtttgctcaacgatttttaataaacatacctgtaatttccagcaggatttcgaataattgcattaacattttgttctgattcagactcgcttcctccagagtctgtagtgttgttttgtgcaaacaccatgtactccggtttatttgatatttttttacctgagccaatattttgtcacttcgccaggttttgaagtttgaaactttgaataatcccacaaacaaatctaaacaatatatccaatgcagtgtatgttgtcatgctagtggatttctagaattttggaattatgtataaacaatctgatgttagaaagtttaaactgatgtgaatccaatcatgtgaaacaaattttatggctcaatatctcctcttgatcgaggtccactagggtatccagagctgcggatatttgagatatctggtaataaatttaccggaggcttgccaccaaattattatgagaattggaaagcatcatcactcacgctaaaatcaagaagggggtttatatatgatatacactaagaatgcttacggtagcatttcttatacctatcaagattttatagatttaagatacaaaggtctacacatggagcaaaagaggattcttactttatacagcgctattgatttttccggaaacagacttgaaggacagattcctgaatccattggtctcttgaaggcactgattgcactcaacttatcaaacaacgctttcataggtaatattcccatgtctatggccaatcttattgagcttgaatcattagacatgtctagaaacggactatctgggactattcctcaaggactcaagaccctctcgtttttggggtacataaatgtgtcccataaccaactcaagggtgaaataccacaaggaacacaaatcactgggccaccaaaatcctcatttgaagggaatgcagggctttgtggtcttcctctcgaagaaagttgcttcggaacgaaagtgccaccaatacaacagtcaaagaaagaagacaaccaagaggatgcaaaagtgttgaactggaaagcagtggcaacagggtatggacctggagttttttttggattggcaatagcgcaaatcattgcttcatacaaaccggagtggctcgtcaagataattggtcctaataagcgtagaaaccattaagatttgttagtgtttgatttttgaatgtatgtcaaattgttacttgttttgcgtatgatatttgaatgtttgtcaagtattccttggtcttgtggtgaagcaggttctctatgcttcattcagctttcctctgtatcttggaagagaaaaatactagaggccgggaacgggaatcacgttatggattttttggtctctgacaataaaaagtagaaaatccaaactcttgttattgttatcccacaggaggaaatccgttcttgttattttcatcattggattctatttccgtgtaaaagtaactttttcccctaaaaacaagcttctctattttgtaaacaaaaaaataaagaaacagaggaaggagacgagagggagaaacagagcaacatatgagatctgtttcctaatgaataaaatgcatgagagagagggaccgagactgagactgaagtgtggcggtgagatcatacggagcgtaaaaaaaaaacaagaaaaagatagatgttcccttttctgtgttttcttggatcccaagtaaatttttgatttcgttcacactctaagttcaaatggattgaaaactacgtgtgttcgtcgctagattcagtttttttagactagacaattcttcttcttcttcttctttctttttggattcttaagttccgacaaaaaaaaaaactagtcaatctcgttttccacacactgaacctggtccctagaccctaggcacatatatattcctctaatcaaatatttcaacgttaacgaaattatgttcagaccaggagaatgtactactaatagacataaactctttgtgatctgttcataattgggtttgtttagaataaatatttcctcttattcgtcagagtagataacacattttccacgacgtccttgtcgtttaggatttgatttcggaccttttgactccaagaaaacatgtcccatgcgttggacaaaaaatagtgacatgcacatgcatttggtattcagactttatgattcatttcccactcaaagacttcacttagctctaacttcttctaagtcaacttgtagctccaaagcaaaaccacataccgtttatttataccaatcttctctctcactttccttaaaccataatcatttaattttcctaaaatagttctcatcatgaagaccgtgtttaaatcgcttctgcttttgcattttctcttgctactcttactctgttttgtctccccttcgagctttttccttctaaaagttccggttggtggtcttgttgcttgtcgtctccgccagagtcaagcctttatgcagttcaaggacgagtttgatacccgccattgcaaccacagtgacgacttcaatggagtctggtgcgataactccacgggtgcggtcacagtgctacaactcagggactgtctcagtggaactctgaagtcaaacagtagcctcttcgggtttcatcagctccgttatcttgctctcaatcgaaacaacttcacctctgcttcgctcccttcagagttctgcaatctcaacaaattaaagctcttgtctcttttctctaatggctttataggtcacgttccttcctcatttaataactaaagtcagctttcctatttagatctttcccataatgatctcatgggtagtttcccgctggtgcgaaatctaggcaagctcgcagttttagacctttcggataatcacttctctggaactctgaatcccaacaatagcctctttgagttgcactccctccgttacctgaatctggctttcaataacattagttcctcacttccttccaaatttggcaatctcaacaaattagaggtcttatctctttcttttaatggcttttctggtcaatgttttcccacaattagtaaccttacccggataacgcagctgtacctccacaataatgagctcaccggtagtttcccacttgtacaaaacctaactaagctctcttttctaggactttcggataatctcttttctggaaccattccttcttacctcttcactttcccttccttatcaactcttgatctgcgtgaaaatgatctctccggttctattgaagttcctaactcatctacctcatctaagctcgagatcatgtaccttgggtttaaccatcttgaaggaaaaatcctagagccgatctcaaagcttatcaacctcaagcgtctcgacctttctttcctaaatacaagctacccaattgacttaaacctcttgtctcctctcaaatctttgtcttaccttgatttttcgggtaatagtttatctccagccagtttaagttcaagttcgtacatcccgctgagcatggaaagcatagtcttgtcgctctgcggcatccgcgagttcccaaacatcttaaaacatcttcaaaacttgattcatatagacataaccagtaatcaaattaaaggaaaaatacctgagtggttatggacccttcctcagctaagcttcgtggatatttccaataattcgttcaacggtttccaaggttcggcagaagtttttgtaaacttatcagtgcggattttaatgttggatgcaaacaattttgaaggagcacttcctactctaccactctctatcatcggcttctctgcgattcataatagtttcacaggagagatacctctttcaatctgcaaccgaacatctcttacaatggttgatctatcctacaacaacttcaccggtccaattcctcaatgtcttagtaacttcatgtttgtcaatctccggaagaacgacctggaaggaagtatccctgacactttctatactgattcttctctaaaatcacttgacgttggctacaatcgactaaccggaaagcttccaaggtctcttctaaattgctcctctctgagatttctaagcgttgacaacaacagagtcaaagacacatttcctttctggctcaaggctttaccaaatttgcgtgtccttacccttcgttcaaacaaattctacggtcctatatctcctcctcatcaaggtcctctcgggtttccagagttgcggatatttgagatagctgataatatgtttactggaagcttgccaccaagtttctttgtgaattggaaagcatcagccctcacgaagaatgaagatggcggattatatatggtgtatgaatacgataaggctgctaacagtccagttcgctacacttatacagataccatagatttgcaatacaaaggtctacacatggagcaagagagggtccttacttcttatgccgccattgatttttctggaaacagactacaaggacagattcctgaatccattggtctcttgaaggcattgattgcgctcaacttatcgaacaacgcattcacaggccatattcctctgtctttcgccaatcttatgaatctcgagtcactagacatgtcaggaaaccaactctctgggactattcctaatggacttgggagcctctcgtttttggtgtacataagtgtggctcataacaaactcaaaggtgaaataccacaaggaacacaaattaccgggcaaattaaatcatctttcgaagggaatgcagggctttgtggtcttcctctccaggaaacttgctttgactctagtgtgccaccgatacaaccaaagcaagaagacgaagaaaaaggagaggtgattaactggaaagcagtagctataggatatgctcctggattgttgtttggattggcaatagcacatctcattgcttcatacaagccagagtggctcgtcaaaattattggcttctgaaaagcgcaaacaccgttagaggattgacttggttttacgtgtgatctttgaatgtctctatcaaaacgttgctgttttcgttccttatgtttatttgtatcttcatgtgaaactttgttctatttccttttcaataaagtaagaatgctaaaaagattgtagttggatcaatcttacaaaaatagaaggaatgagaataatcgaacaagaaaaatggcatggcagggaaaataatggcatctagaaagggcaaactaggtttgactcatcatcgcttcttctccaattactctgtcccaaaaaagtaagaacctactctgttttgtaaaagtatataatgaagaaacagaggagatgagagggaaaagcagagcaaagtgatataaaggaacaacagttgtctctatgtttcatatatcgtatagcaactgtatagaatcaaatctgtaagataataacgctctccttatccattttatgtttcacaaatcgcagtaacaactgtacctgctctattctattttttcctttctatacaaggcaagaatcctttcgaaaatcatatacatctctctgtctttcttatctgtttcatcatcaatcaatggaaactgtaaaaatccaaagctaagtgttgtggaagacctggtggagagttgtagaaccactcttacaaattttgcctacagttgcattcatatccctgcaatcatcttctccacccactgagcgcaaatcgtaatatctgttgttagctggtgttagctcgtcaatggcattgcggatgtctctgacggtttggtctgatctaaaaggaatatataccggtgtcacagacccaccatcgtccaagtagatagttagtgtaattgtagtcggtgcagcttcatgccccacacttgtccagccttggatggcctgaggatcaagaaatgtctccgtgcttaaatcttcctcaacaacaaaaaaggccacatccaaagaaagaccatcaagagagatatatctaggttgctaactcctaatgtaaaactaagatccctatttttcctttacaggttctgttttaagctaagctttcaagctaacacaattcgagaaagtagcaagactatagtaaatagtgcagaggaagagaaggaaagttacatccacttgagacgatgccattggaagattagctacggtgaaatcagtcgggtcaatgttcgtcaaactgtacaagtaggtgaatggcggaaaaaagaaagattcagataaggatgttcagagatcttgaaagaaggcagagagactcatactaagtataatcgggaagtcacctagaaaaagagctccccgaagcctgaaactgtgattgtgaaggtagtcctatcaatggaagaggcgggttggatgttacatcctctgtgaaatatgcctcattcatgaaatagtcgatggcaacttgtaaactccattggcaacgctcgaggtaagcgactgcgacatctggatgcaatccaacaatctcacagaattgtttgatgatttcctctttgtttagcggtagttgctctggctgaatctgcagctcattcgaaatcggacaagaattcatcaccagtggcctctctgttggtgactcccactctggtaccgcggatatctcattcaccgaaaccactggcgaagatctaaccttgagggtaggcaagtttttgctgcggcaagcctctatcgctgaagccaaatcaccatcgaaggattcaaggtaatagactgcttcacctcgagacacaccagtttcagtgcagattctatcaatattgtttggcggtgggtggtcttccaagttttgagcagaactgctacttccctgaatctgaatgtagaaaatgcaaacagttaaaacataggagaaagattgagtctgaaatcaactctcgttttctctaaagttccttcatcatcaaacacaaagcttctatgtgcatcaatcaacatagagttagttcccttctttgtaaagactatcttaaggaaacagagcaaaccagaagaaagatatagtgcagagaaagagaagattagtacctgaacttgagacgatgaagacattataggtatatcgtatacatctccaaactcatccacatcaacgttcatcaatctgtacacaaacattttctcaggaatcaactaaaccctaaatcaaagaactcaccagaaatcgaattcgatagacaaaatcgcaagaaaagtaaaaggaaattacccagaaaaagaagaagagtggtcccctaattgataaccaacagaatcatgaaactgagattctgaaggtaaatgtaacgatggaagaggcggagcactatgctgcatcaaatccatagtcgatgtttcattttgtgagaatccttccaaattcgaaaccccaatcatcggcgtataaccctcttgaaaccgctgcaaatacgactgatcaatctccgtacgatcatatgaagtacgctgctgatctcgatcctcatagtattgggccccggctctctccacgtcccaattgaagcgctcgagataagagaggacttcttgtgaaggcaaatcagaagccactgctaggaatagattgattcgttcttgcttcaattcatgcgatagttcctgcggcggattcaaaacccgtcctgaatggcttctttttcttggcggcaacggattcgaagtcagacttggataattgatcgatcttggatcctgattcgaaacccgaggtggaattatcgttaatggagtagctgaatattcctccgccgtggactgctctgtaactgaaactaccggtgaagatttgaccttgacggaaggcaaggttttgacgccgcaagcttccatcgccggagctaaattccagtcgtatgcttcgaggtaatagagtgcttcttctcgatatgctccagtttcatcgctgattcggtccacttccattggattagtcatcgtcgtcttaaatttgggcgggactttcaaagaatctttttccaagacgacgagagacgaatgataatcttcttgaaaaaaacagcgtcgtttttttatagtagagcctgaaacgacgtcgttgtcggggaactctgttacattcacaaaatacgaagggtaaaacggtaaataagaaagaagagaccgttctagcttccaacgaattaaatcaaataacaaaaacattagtcgatattaattactataacttataagaaaaaactctaagcttcttttttttggtagggaaaactctaagcttataaatatcattagaaaataactttgaggtattacagagagtgatagttttttttgtctgcatccgttttaggctttgtcactgctccggtttggatccgatgtggcgtagaaattttattttcactgctatttgtatttttctataaatatatcaaaaaaaattttgagtaaaataaagaaaaataacaaataaatttttagttgatgtaaatgtatttactgtcgcaattaagtaaatcaaaagaattatgtaagtagcctaaaccatctttatataaaacatagcaattacagtttcatgatatattaaatgttttcgttcggcgacttctttcactttctgaatttattatgtaaatatttatatatatatttagataggtgatgatacatagttttttaatttcaaaaaatcataacatagttttattttatcaaatcccaaaacaaagagttgccccttgtattgttattttgacggctgatggatatcgcccgcctcagcaagccgttttatgtaaaaagggacgaaagcacaagatacgatgtaggactccgcataggccaaagtaaaatatatgaacagatcaattgaagtccactaccacatgtctttaaagaatctgagcaatatttgcacataatcagctacgtgaagtccactgccacatttgttttgtgcatgagtgcatcaatgatgtatcgaatcgatacgaaagccaaagccgcagcgattagaaaagctatcatttcattacaacgtttgacataccatggccatcggttcttataaatcaaaagtttttttaaaacaaaataaaatcttgtaaatgaaatatcatatgctaccaaatattaaataaaagcatttatgttatgttatttttagattttatactaatttatctctaatgaaaagaatagataattagataaaaacaaaatacgtccggctaaaacaaaaaaaaaacaaatctaaactaaagttatagtctcgcttgtttacagtgtttccacgctgctgcaaatttccttccgtcattgtactgtcgttttgtgatggctcaatcaccacagcaagtatcgaattcggatttatcggttgctcttttggcttcctcaaagcaactaaaagacccgccaaattaggcagatatgagaaataaatataatttttaatataatttttgaattcaaatagtattccacactttttatgtatagaaatattttaaaaccaaattttaatcttacacattctattttataatataatttaactatttatttataaaaaaaactaaattttaattttatacactccatcttaatagataagagctaaaacttttgattttacatacttaatcttattttttttttgttcgatcatatttaaattttaaatagtacatctatttttaaatatttaatattcttacgcttgtcttaattttctattctctttaaatattattaaatcacgtaagttacactttttagtttagtaagctactctaaacgttttactcaaatatacttacatttaattctcattcatcattgatggtatttagtttctacattataatctttatctatacatcacataattttttttgtattttgttatatttaattctcattcataaatgtattaattttaaagacaccgcactactataatattaattctttttattatatattttttgtataggggaagatatccaaaaccttggtttgtagtgaggttatatgtgggaaaagatcgtcactagcgtagagattatccgccatagcttctattggtgcaagcatgactatgtctatcaacttattgctggtcttgtaaattgtaatgaagcatttccttatgttttgagcttagcttgtagctaactcttctgtaatggctagcctctgtgtgcttcatttgaaattctctgttcccaaaaatcaagcctaatacgtcttctgccctctatttaatatgcaatcataataaggtctttagtttaacagcaaagagataaaaggaacaacggttgtttcaaatctctctatgtttcattaatcgtttcgtaccatacagtataagaaaactctctttatccattcctatctcaaacaactaagtgcaaagctgctctgttctattttttccattctatacaaggcaagaatcctttctaaagtcctatacatctgtttcctttctctctatgtttcatcaatcaacggaaactgtacaaaaccaaagctacaggtagatctggaggagagttgtagaaccagtagatatttcgtgtacagtaatgtctggatccatgtaaactacttcagccattgattgcaaaatgtagtctttctcgtaatctggtgttagctcgtcaatggcatcacggatgtctctgacagtttggtttgatctaaaaggaatatttaccgatcgcgtattggccaagaggatagtcaatgtaatagtagtccccccagctcgaggccccacaattatcctgtcttggtaggcaacaggatcagggaatgtctccatgcttgagtcttcctcaatacccttacccttcaagttaaaagacaaaacaaaatattgataagagaaacttgagaactgctagcagtactgtttgagtacccttttgttaagatcgacattgccggcttatgttttgcgcttaggctttagtaaacacagtccgagaaaacaagcaagaccatagaaagaaagtgcagaggaagagaaggttacatacatctacttgagacgatgtcattctaggaatagctactgcggcgttttcttcaccagcctcttcgagtgacctttttaactcggtcggatcaacctccaacaaactgtacaagtaatcaaatggcgggaaaaggatttagaacttgatataaatcaacatttacgagactatttcatacttcttggagacaaaatcgcaaatgaaaaagggacaaatcacctagaagtgcttccttctttcaagtaaccaagtgaagcctcaaactgcgattgagaaggtaattcgatggatgaaagaggcagctttctgttctccttcaaactcatattgactgccactgacgtttgatgctctgagaagtcctccatataaaagccgatggctcgatgtacatcccagttgcagactttaaggcaatagattgcctcctctctagtcgctgtactagccgcctcgcagaatgaagagatccattcatttttcagtagagacggttgctctggcgaattcggcggcgcctcagcagattcctggctcgccgaaaccaccggcaaggttttactgcgacaagcctccacagcccgactgaaattccacttggatccctcaaggtaatagaatgcttcttctcgagacactttggtttcatggcagattcgatcaacccaagttttcatcggcggccaaacactagtactttcctggttttcttgagtctgaatggagaaaatgtaagcagtgtatgcgtcaacattgagttccattcttattaactatcttaagaaaacagagaagtccatcaagaaatgaaactaagattctaaatttagcaaacacaattagagaaaacagcaagacaataaccacagagtgcagagaaggagaagattacagtacattgacttgagatgacgccattagaggtggtatagcttcagggatctgttctcctgtcgagtcaacttccatcgagctgtcaaaggtaagaaaatggctaaaaattacacacaaaaaaacccttactcgagaaattcaccagaatcagaaagaaaaaccctaaacacttatatacgaaacaaatccatactcagaagaagatctcccgattctgagtggtttcgagtaatctagaaaccgcgattttgaatctaatcgtagaggattcgacttcttttgaagaggcgttgcacggcgctcgaccaagaaactgtcgacggctaggtttatattccaattgcttcgctcgaggtaagcgcgtgcctcttctacactaactccagcaaccgcgtagcaaaatcgtgcgatactttcatttctcgattgttcatccggcggattccaactccgaagaggatcgatcattaatggagttgtcaacgacgcggagttagcgttcaccggcgtagattcaactgtgagggacggcggaaacggagaggtttggttgcggcaagcctccaacgccgaatcaaaatcccagtggaatccatcaaggtaacaaagtgcttcttcttcacatactccaagttcagcgcagattctatcaatcagatcagccttcgccgttggtgaaaggtgttcgtccccaatttgggcgggacttctactttctttcatccagaattttgccaagaagacgatggagtttcttgcttaaaacagcgtcgtttggagtgaaagtgtaagaggacgtcgtataacgcaattaatccacaaaaacggcaggggtaaaaatggtaagtgtaaactgcaaaacagaggcaaaaagaagagaccgttcgaacttcttaactaataaaattgacaaaaatctatattgataattgatattttatacacactttttatttaaaaacaaaacaaaaaaaaaaagttgagaagaaaaactctaacaatatagaaatggcaaaatgggtgcaaaataaaaccacattttctttcttttttttgtattgattaaataaaaactatctcttataagttgcaaccaagctcacatcttcttcttcaagtttttgctcctcaagctctataagtctcgcaaacacaccgaccaaaggagcagtattgtacgtacaagcctccgtttgaacgtaattacccctccggtcatcaaaatcatcctggtgatccggtcctccaaccaaagccccgactaaaacactcggatttggctcggaccgtccataccaattatcatatccttgagtacatcctataaaacctttgtgctctttaaaagaagcgatagacgcgcctcgatgatgaaccctaatcgggtattttggaccgtacccgactagataacttgtttccattggatttgatcctaaaatgtaatcgatttgagatttcgcaaagccaagcatctcgtcaggagttacggttccttcgtgacactcgagatcggtgtttgattttcggagatgatcagaatatacggttaggaggaaagatgctgtggatacgtattgcatattgttccattgtcggacgtagagtaaaccggcaggagttcgctggacgtttgtgccgttgatgttcttgttgagaattgagcataggtaatgatccgcctttgatttgtattgttgtaggactttagaatgttgcttgtgcttttcttcttttagcaactgaaaaatgaggcaagtgttgttagtgcttaaaactcaagtagaatttcgtagactagttcatacataagaatatagcttcttctttttttgtcaatcagaatatagctaatttatcaagtaggtttagaatcacgtgccataaaacagaaccatttaaagagacgtatccgcttagacttagaggaacaaaagcacgtgacctttagttttgtttctgcttcataactaaacttttttctaaatgctagtactaatatttagttataaagtatttcatttgcatacaaagagaaaatatttgaatagttgttgtacatatgtaacgtggggtggggaataccttacttttggtaattcgacgtgagaatatttaaacttgataatcacttcacataaggcaattataagattctacttaaatcttaaattagactactaagaggttagtgctataaatatttcacttttaccacacacaaaattgaacaatatgtaagtactaaccatggaagctaggagttgaacaccggcgaacttgacgtcccagctaaactcggacatggcccaagaaaggccacctagttggtgagccatgtcaaccacataactcatatagtgctcattgtcggtggctcgataaagccaagtggcaccccataaaagctcgtccatgtacccactcaccgaggcataataacttttcacaacttttagactctcatcgtattttcctctgtacttgtctccaaactcaaacaactacaaccaaaaccataaccataacttatttaaatgtcctacccaaaaacattaaaatgtctgttccaactgtaacattaaattaaatttaaaatgagtatgtatgtacttgttgggcatggtgcaagagaaggtgagagtaatgtggatttgttgaacggaaaacgatcgaagctgccgccatagccgccgcagtttctccagcgatatctgatcccggattattctcatcgatcttgaaagctctccgtgaagtcgtcatgtcctccggtctttgccaacagtagtggtcagtgtcaccgtcgccaacttcggcccataagacatttgggcttgtgtgtgccttgatgaagtagtctgttccccacttgatggcttcaagcgcgtgagataactctccggtggaagcgagtgagtcaccgtactctattacactccatgacaacattgtcaccgtaaaagccatcggaagtccaaatttaacatggtctccggcgtcgtgatatcctcccactaaatcaacctttattaccaaaattttaaaattaaagtcacatcacaaaataaaacaaataattaatttcaatacttaattcacaaaaggttttcaagtctcattccaaaccaaagaaaataatttctttaaatggaaatctacaataaatttatgtattatttataaattaatacaaacaataaatttcaattctcttattaaaattcaaactaatgatagtaaactgaattagtttgaattcaaaaataaaattaattaaaaaataaaatgacaagagttttgaacagaaaacaaaccccttgttcaagaccatcggtgagaccagagtgatcacgccaagtcacgcgctggttgtacggaagtcttcctgatctctgagcttcaaagtagagtaagcttttagacaatgcttcaccgtagtcaaaccctccgacgtctgtctcggaagaaacaccatccaacgcggcagagaagacagtgatcagaaggaggaggagaaaatgacattgcttgtgtcggtgattcatcacagtcatatttgtgaagatctctttctctagaaagaagtctctgttggagatgaagagagagcgagagagagaaagaaagaaagcgatggactctctcactcactagtctctctctatttctctgctctcgcaggagagggatatatttgaaagctctgtggagtggtggaggagagagatgacgtgactttgtttttatggttaacttttgtttttaatctaaaatatttccacatgagaaaatgtggagacttttgctttttccatatagtggtaatggccgtaatttatgcagctagttattgcttttactgtgctaaatctagaccgaattaattaaaagtgcatgtagtaaagtcattttacatactatttacaattgttgaaattttacatttgtactgtgtgagagggtgttttatgatacttttcctaatgatttcaatttttgtttcaaaaggtggtgataatttcaatgtatttagcgatcttgtgtaattttgaaaagtagaaggagagtgtcagttgttgatagtgtaacagttaaagtggacgattttgtctcttaattagtttctcttaattatttcaagtttccatgaaacggtccaattaatactaataaattttcggaaccgtagaatgtcattgctaggcagagattcgtttctgtttctgtcgttaaggctgctgtgttaggcgagagaatcgtgaatagtaaggctaatttctcaaatcaaaactttggttttggctgggttcactgttacaaattataaagtttacaaaaactatcacaaatgttaaactcaaatctgcagagtatgaatactaatttattcacctctattgatatctaaagcaaaaacaccaaacattcaaaaatataggatggatctaaatgggtttgaaagatggacctgggtcatcttaatataagtttgcccaccaccaataaaaactgaggggtatgacaatggggactaagagacacctacacgtgtgcagtgcctacaaccataaatttggcagtaattcaggtttccggagtttcatgatgaccggtttaatttagcggtttatcttttttccgagcaccgacattttcaaagtgggcctaactatttgttaccttcgagctagctcgaccgacaacttggtcaaaataatttgacttgagcgaaccaaaaaggtgattagcgccactaagcatggagacgtaaaaattgttaacggggaacatgcgtttatttgtttatcattacttgtatcatttaactatatgaatagctgttgacaaactaattaattttcatgttgatccacaacaaaattcgtttatacactttcattatactgtatcttttataaaataaagttagtttttaaaattagtttcgatttgatgttatattataaaatttatataaagtttacattaaaaatcctactcgatattcttttaaaatgtcttttttttttaaatggattttctctgtttttattagtgaactttttcttcaaaaagatgactatagtttcaaatgtgttaaattaatcagacggcaactaatgtggaaaaaaacaaagtaattcatatgattaagttgtgttgcatgctggtttaataaagctttctttttcagttttcctagtcttcctcttaatttttttttttttttttttcagtttcctagtctagtttttgctacgattcagttttctttcaaaggatgtatataaaaagaaatgttgttaaaaatcagtgagccccaagtgcattttttgagttattcttcagtagactggcagaagaacgttcttttcaaagatagtagcttgatcagttgtcgcaagaacaatattctttcaaatattcatgagtagaaaaagatggtcgtttcctatcgtcttgagtcgcaaaccattaataacttaattaaaatgtttaaaacaaataaaacgcctcttagttgtgataatccagtcgttaaatatcagtcttataaagtttaactatgcattgattattcgcttagcttatgcataaaattttattcggcatctggtgtgtggtgtggttcgtgcaacccgctcaattaactccgaatctatggaattaataatgttgtcgttggtggttcccatattccaaaagaaagaaaaaaactaaattattttcaaatgattgagcgccacgtgtctcttcgtaccagcacatcaccgacgacctcaagctccaaagttacactatatattccaccttactagttactacgatagtattttaagacaatatttaaggaactttattacttgttttttgataaagaaatgagaagatgggaatcgaacccattacttagcttgagtataatatcataaaggaaccaaatgagctgcgaataaactttattaaccccatatgtctagcttatttggtgagtacgagaaggattgaattttgcttgttgttggtgctgagttcaaactttcatttgggaaaggatggtttaatttcatttgggaaaacttaaattcttgtttatttaagcagatttgatgtgtttatttttcttgataattattttagattcatatgacaagagtcggtcgatgaaatttctatgcatgggttttgttttctctccctctctctcttaaatccatgcagaataaaaaaattggcgatccataataatgcagaatattaaatgcaaggtataaaataaataaatgtaacaatcaaatcccaatgtttttagttaataaatatgttaataaccagatctgtcaaatctttgatattaaagagtcttttagtataaagtgaagaactttttattagatcaaaatatgtttttttgcttctagacgttccatatttcataaatctcccaccgacggtctcacattgtttcgactttacaattaataaacgtgccataagctagaagcttctcagagcaatcttattaaaaacaatcttaagaaagattcaagctttattaatttagaaataagctaagaatttatatacagctcagctcatgatttctttatatatataaaaaagaaacttaatatataactcgtaaaaagctttatgtattgtacaaagaaatgaaaaagggaaagactaattgaaaaacaccaaacatttttttttttttttttttatccatatcaaggttaccatatattgatgttataatttctaaatacaaatatatttaaattctcgttattcaacaacattttttcataatggcatatcaacaatactaatacaaaccactagtttctattacattggttggtttttgtcgggttgctttcgttccgtcacgtagcagatctcagtgtccatatttctcgaccgtccgtaatagcatgttgggctatcttcagcatatttctgggctaagcccattttggtcttcggttcttcttcagatgtatttttgtgaagttgttggatgacttacaattttacatatacaaaagtaaagtataaattactgaagtaggaaaaaaagaaaagagtttaatggcatgacgaaaagtttttgaatatttttgaatttggttttatatataacaatctggatccgccaccgtcgaattaatctccggaaagctcgtcgaaagatgtcgatgggaggcgacacgacgtgggttgggaagaagccgatcagacgcatcggtggattatctgatgctctctctatcgcctccgatctcggtttcgccgtcgctcctcctccgtcgcaggtaacttctcttgttcactttaatctcatccgaatcggaattgcgtctccggttagttccattagcttgagtatagcatatgctttgggttgtatgctattagattgactttgcagaacaatgcgtatgagagatctataatttgaaggagattatgtttctgaggaatgaggaattttagctgcttgttagttttgcgaatctctggaccatatgttttgattagatctttgatctcttggcttttatatactgaatctgaatttttcatcaagtagagaatatttatggttagttatctcttcaattggctcaatcattttccgatgtaggaagaattacaaagctttgcgtcttcgaatggggaaagaggtgatgatttgataagggtattgagagagttatctgttgttcaaaggaaaattgcagacttgcaggtcgagcttcaagggaggaaggtatctttctcatggttttggtttctttttcaaattgaaataagatatggatcatagtatttgcattgcctgaagccttatgataacttattggtatatctcatgtaacaacttttgttagatgctttgtatataacttcttttgttggcgaatttcaggatgataaaaatgtggcgcatttgactcatgttggtgaaatgcaaaagaaaatcgagactttgtcaaggattactcaaatattgaaagatgttatacaaaacaaggtaggatcatttttcctttctacttacctctaaaatcttctctctcttttttttctggactaaggtttatgtatctttcgagttcatttatctctcttttctgtctttaagcgatatccctcttattcactatcgttctgaaaattgagaaaattccttaagatgttttcgaaacattagcttctgagtacgtcttaagactgccttatcttttagtcaatttgtgaccctctagttgaagtttattacatcatttgtctgtttatataacaggatcgcatcattgctcgtctccaacaaccttattcgctagattgcattccagttgaagcagaatatcaggtgattcatgccattttatactatttgcaactttgaggaccttatttagtatctgaagttgcacaactggaaaacgaagatgctatgtttaatggctttgttctgctttgtttttcagaaacaattctcagagttgctaatgaaagccgccagtgattatggcgccttaacagcatccgtgtctgattttcagtggagccaaaactttaaagaacctccttcagtctggggggtacgattttactctcttttacatgcatcttgattttttttccatttacatctttgactttcagacataactccacatgtttagttgcatacattggattactcatttcagttggaatctaatacattgttcatagtgtaagaggaaagcactgtattacactacgccatgcgttaactgtatagaatacattgcagaaggatcagttgtgtcatcaggtccttgaattagatttctatgtgtttaaactctttgcatcaagagagaaggagattgctacttttacgtaatgtgttgcataacagttgttgatttcggttttacatgctataatctcaatctctctactctttttttccccaacaaaattataggaaatgctgcgtccaatacctgtggcactagcgtcatgcacgagattctttgaggccatgtctgcgatgagagaatcattcgcgactcttcaagagcttcgagttggtaactctgcagtttctttaccaacaacaccaggaggtaacgaaatgacacatagagactcagattgtgtgactccacctcaagggaggatagagtcaagcttcgacgatttagctgttcataaaacaaggagacaaaacaatgatcaaaatgaagaagaagaagaagaagaagaagaagaagatggtaataacaatgggaaccggagactatcttggcctccttctgtaaaaaagagtagcgtttaaacagttgcttttgtctttgcttgagctttttaatatcgatcgtgttttgtttcatcagcattagtgttctttatggatttacttatttctatttgatagtctttgagtgaaacttaaaacagtgtatattttgttaacactggttttcatggtccatgtgactatcatattttagtctgttcgtttgttcgccgcttgcggctgcggcagaccgcggcaaaactaccgcaaaattaaaatatttcatagatgtgggaattgttttagtcgagaaatctaaagaggggtctataaaaaaaggattagcattcataggcacaatcgttccactaaataactcgtatggtctaaatattgtagtatgtagactgtagagagtagaccatgaatttaagacaactttaattgagaaccggtggcacctaatcatattttagccacctagttacatagcccggtctggtcttaaaagtagtttgtgtaaattggacaataaaacctcatatatcatttacatgatatttaaactgtaaaactcatcactatttaaaactataaaacgaaccacaaaagtgtttgcaataaaaaaaataccacttatatataaaattcatatcagattagattgcataggttcactgccaatccatggccaacatttctaaatgatatacagtacatgaaagactattatattcaactattcaaagttatctgatggaaaattattacatgaaatcaaataagtagttgaatctggatgatcgatctcaatattcatattaaaatggaacacacttttgttgttagagtattgatataatgcatgtaacgtgaaattgcaataatgcatcatatataggtttatatagattaactgagagacatcacttgcgttggttactcaataattacgtagctaaaattaataaagcggcgttaaggacccacccacgagctctatctatatatttccgtggtttttgtattcgaaacagaatcgatcacatacgtccaaattttgatttgttcctggcccactccttatccttacgcgcccgaacgcgtgtccttttaaattgactctttcatataaccaaaatatcagaccaacctctggtttattcggtttagcgattatactcattattacacattttccagacacacaaattgagattatttaatttctcacatttcaagtatatattaaatttcggatgcgtgcaattaaatgaaacgaataaatatgtgcaagcgattaatgtaccgacgcaggcgatgaatattcgtatttctcgcaactttaaatgtcgatgatacacttttcaaagcataactttaatgtcaaatgtcaattcattgtccatgcgtccatttcccactctcgacacctattttcatgtcttaaattcttgatttattgcttcatttttgatttttatttttattttgttgtttacaattcattatttcttgttcattttctgtaagacatttgacaaattatacaaaagaatcgaatctacaaaacatattctaatctaaacaacaaaatctaaatctaacagtctcaaaaatatttgacaatcatgcaaatatgttacagataatatcaatttttcatgatgcgagaaaataccattttagtgctcattgaataaagatgcattattagtttgcggcttttcagaagacatcaagtctcaaaggaccattatgtaatttgaagaaaataggaaactacacgcgcctgccaaagaaggaccttatcccacgcgtttatatatcttccaatccataagcagagcttctcttcaacgtgctccggtgaagattaaaaaccgacgagaccctggcgccatcacaactacgcaatctcattcctccgtcttcttcggctttcaaatttaccattttacccttctctttccctgagacgtcttctttggaaatattcttctcttcttccattccaagtaaacccaaattctctctctctctctatctctcaaatttcaaattccggatttattgattctctggtgataaacctaaacctctggttttgatttgtggttgttattgttgctacattaatggtgcttttaattttttctctgatccatttctcgccgtgtgatttcaaatttctccggctgtttttgttcgccggcgggcggtgttgattcgattctatacgatttgaatttcctttttctttaggttttagagtttccttttctattaagtaatcacacaattttacaaatttgttcctaaatttatttatgtcattttaccaactaactaccattaatttgtataaaactcgtcggcaatagcttcatgacctctttctctcaaggctaagctcttgtaatctctgttgagaatttgttgtggagtatgatgataatgacgaataatctggaattacgtctttcgatttttcagtgattttgaggttaattggaaattagagtgcaaaattgggatttagatggggattgctgatgaatctaaatgtgttttccccttgacgagtctccagatcgggtaattttatctatctatttgatctgcattgccgcttttttttttttttataagttatgattcacaggatcaatgattctgcagttaattacgtgacctgtttttgaatgaagtacaagcttgttgagcctttaattggaaaactatgttgtctttccagacaaaacaagatctgtttttgtggttttgacaatttattatctaagttctgcaattaaagctatcacttatttgtgtttctttcattatcttgattccaggcttatgttcctctcctgaatctgaactagtaatcagtttttggtgttaatgtcttaaacatttccctctgaagtgaattatatttgttctagcaattctcttgtccagtttcttgaaattttcttctacgtatgtgatattttaaagtctcactcgtgttggctactttttcttagcagagatcttaatctgatgatactttcgtgtgttttttaagagttaactacattgtcacactttatttgcttgattgttctctgcttttctggttaacctttgtttttttggttggttacagagacttgcaatcatatctttctgatctcagtattttcctgggaaataaaagtaaaaagatttacatattggtggataaccggccatggttgaatcctggcaccagatctgctcatttttggcaactaatggtcacaaaggttgtaaaagctgcttcaagtacatttctctgtggtgtgtaggtgaaaaattatggtaaagtgacacatctatctttgtttgcagtccagactctccccttttgcaaacacgaaacttcgaggggagaagaaaaatcagaatcaggacagggagaagaaaaagtcgaagcaggaggaggaagagaagcctaaagaggcttgttctcagccccagccggacgataaaaaaatgaagaagcttaagcagtggttctcattgatagatgcgacaactttttcgaataagaaattacctgcaaagaaactgcagagctctttgtatctgaaaaagcaactgcacaagaccttgtatggtttcatcgtgtttgagattgaatgggctaatgtgaggggtatcaactacttaaatgagctacaggtacttcttgcaactgtccactttttttttggtctgacattgtgtgttattcttgtttcttacttgatctatatctttatgtagacagacacatctcttgctatagaagctaagttgatgcgaaggtgggagtttgagagtatcgatcaagctgtgaaaagcatgtctcagtggttctctggatcaaaagctgaaaagtcttgcttgagggaatatctcgactcaactataggtattatagtttttcataaagaatatctattctgatttaactttgaaattccttttaacaaacaactttgctatagtggtgatacatcttatggcatgctttaacgttgcacctttgtggacttctagcttaaataagcttacagtattgtaattcttgcaggagaggtttttcatgacactgaaatggaattctcaaaaactactctctctgatgacgatgacaatctttctgttgaaaatgattctccttgctgctccagaagtgtcttcaacgttaatcattctgctgcaaattatgatgaaaacgagcctcacacaccgcctctgactggaccgtacaagagaagaagagtaactaaggcaatcagcaccggagttgaagttgactatatggaggaaacacccagaagaaaagataactcggtagaccactgggaaagccatgtacctgattgtgacaacatcattgaagcaacccagtataaggatgtactagttcttgttaggtgtggtgaccgtgatctccctttcaagttgcgagaggttataatggctgacatacgattgcttactttacttgaagctggtctcccttcatgggtcttgtttctgcagtcttatcccggtttctgtcatctttatcgaccctggatgtgccatttcgccagagcattatatgtgatgatatctgtcatcactgttgtgattggtttttatgacctgtacaaaaatgtccctgttctgaaggctactgcatctcggttatgtgggccactgttcgattgggttgaaacatgggacatggtatcccgaataaagtacttgggaacgatgttgtttcttcacaacttccagaaagctgtcaagtgggctctgactatggcacgtgctatgcagtcatttgtttctttttgcataatgcctctggtaaatcctctcttagacattcttgaattgctcctaccgttatggaattcgttggcggaaacagtggcaagcttggtttcagtggtttggatagtgatggagtctggttgcaatcttgttggtgatgtggtagagttggtgcttttgcccatctcgctagtttggaacgtcagtaagtaatcaaacgtttgcttgagcattccttttctcatctctatataatcataatcctgatatttttcttctttttgatgctacagcaaatactgttttactacctctattctggatcatatgggaagtggtatatgcaccgatcagagtggttgctgcattggccaattgtttagctgtttccttctcatacatattcgatgttattggagatttatggaggtatatgagcagtatacttcagcttgcatcagattctcaagcagctgtgaagacttatgaagtctccatgtggcgtacactttggaacgatctcttttctcatgtaagtaaacaatgccaagtacaagagaaaaaaatctgaatccttgcaacttcagtaattactaattgtgtttgttttgcttcatattttcaggtttttcgtgctgtcaggagcatattgaacggttttgtagcattttttgctgcctgtaacagacatcggcttaggtataagtgttttcttacacatgttttacagttttctatatgaccatttctgacatatattttttgtgattgatctggtttctgtttgcagtacatataatcacatacaagagtttatggagagagtacatggacgaaccacgagaccagaatctatagactcaagacatggcaagtctgttaagaacaatcaacgtacagtaagttttctctcaatgttcttctcttatgggaatcagtattgtgtatttgtgattctcatactggtttttgatcatttttcgcagggagacgaaacgagaaggaaattgcaccttgcatagaagtcaaaacttaaattcttttgattactttttcttgccagagaatatgataggttagtgtatagatagataggttttacaccacgaaacattgtcccaactcccaactcagccaaatgatgtatataagaaagaaagaaaacacacactcaccactcttcttgcaaatcttctagtgggtcttcctcttcagaattggtaagttttcgatataataacaaaaaaaaagagagaacatttttatgattttgtaaagaatgtaattataacttatgtatggaaacgactttagataacaatgtgagttggttgatgaggaaacccagtgaacaattaacacaccaatgcacaattgatacaatagacatccaaattttgtttcacttgccaatgacatttggtaaccaaaattagaactcgttactcgactttgatgtttcttctaaacaccaaaaaatacccttttaattctgatcaattattcactatcacgggattgatcagaagaagctgaacagactggtattgtgactcacgttaacctgatgtggccagtggcctatcggaaatgttgagaagaatgagtggactcgagttaactcggatgtgactcatcaaggagatgtttggtcgtatatgtgtcatcggtttaccaaaccagttagtcttactattcagtttagtatagtgattgcttcacattattatcatgatgaggatactaatcctgcagttgaataaatttcatattaaactaaactgttgttttattttgttgcgttaatttataaattaatacattattagattacaaatgaatcaaaagaaaaagatatacaatattcttcttcttccaattattattgttattatttgattcagaaaaagaaaacaaaaaccagaagaatttgatgattcctcaggtaactcatgatttttctcctcctttaattttgttattcaactatggaaaaaagggaatgacggattggtcaaatcttctttgattgtctcgtttttattttacctattggagcaagaaaaagacattggagtgtgcttcaagcctgatacatcgaatgactccaagaacctttgatccgaaactctagctttagccgctgcaaatcgcttatactcatcgagtatcgatgttatgcaccatttctggagtttcctcatgcacccaacaagacacccggttctgtgctgcaatgatcatatataaaccattgtgttgagtcaatacaaagaaaatgaaaatcatttaaggagatttatagcttttgatatttactattttacatataccttgcctcgtttgcaatgaatcaaaagtggatggttcttctcatctgaggattaacaaagaagacaggattagaagacttgtatatataaccaaaacatatgattttctcttaactttgttttagggcttctatgatttttaccgagaaggactttgagtgcttcacggattttctgatctaggatatctacaaatggctcctgcaaaaatgaggatcacactatcagtgccttggtaagtctttagtaacgcacaagccagcaaaaaatatatccaaattatgatgagatgtgtcggctatattcattcttagagaccgaaattgatcagaaaactagattggttttggctgttccctagagtactgtaaaagacctgtggagtatattctatcttcctatttttaaaagttaagcacaacaaaaaataaacacaagatcaaagagggtccatcaaaagcagccaataatgaaaatgatttcatatgaagactagagactagagagttgtcacacccaacataaagaatcttagccaataaataatatatgaatgtggaatatccaatacccttatagtctattataagaaaagaaaaaaagccactttacttcatgtttagtctaaaatcaaaaattaacaaactacatatcatatatacatgaaacagaattgacaacacaaggcttagtttgtgtgagagagagaatgatcactaccacaatagcaaatcagcacaattatatttactttcagtcttctctttcgaatataaagatgttctaaatcaaatcaaactagccgccccatcacaagttgtacaaacttgttcaactaaaagtaaaatatgtttgcttggcttcttatctctactttaatatctaaaaagttacagattatacacttggagatcaagataactagttcacgactctagtttttggttattccatgaaacgaaaagtcattttatccaaacaagggccaataaaacataagcaacaataggtaggtaggtatttacacatcagtaactgacattaaacttagccatctatcactttcacacttaattccagcttgatttatgtactatacctaccagttgatatgtgaatactcttaccattaatacatcgacaagtcactatccacaaagttttcaccaccaaaagttaagatacataatataccattcatgcatcaaagtgcacacagaactaatatgaaccaagaaaacagtatcaacatacacacaaagaaaagtaaaacttttgagtagtggatcactgacaatacttgtatgcaagaaatatttttgacgcagcccattatctaaaatattatatatacacagtaagaggaccaagtggtctattagttgaggaagggcaagcaaacaaacagtgggaccatagagtcaatggtaacggacagagccaagaaaagcatccttcaataaagcattaaagaatggtgtacacttttcttgggcggttcatatataaaaaatatggataactagtctatatcataacatgcataagcaaattactactcctaaggaaacatgaaactagagatacacatgcataattaaagaacagttaggcaacattaagcaattcaaaactagaactccaaatagtattcagattaataccgaagtttttgaatttccatttgtataaaaatcctctttctgatgcttagaactccaaatatgcaaccaaacctcgttctctaatccgggaagacactgcaaattcaagatatccaagagatgtgaacttttaattctaataattcctcctaaaaagttgtgacaacaacttcaaaccacaaaatcagaattacagagaacaaggcagtgattgagaaatggatttttataaaccagaggccaaaaaaatttagcaaaatggcacacaccttggacttagagccttcaatgccaaactgaaaaagactaattccattggatttgaggaactgcatgttgttctcaggatatggctctggacacaaagatcttcacacatttcccatacacaaacaaaccacaaaaacttgatgtcagaaggaaaaaaaaacacacacaaaaacctaaatcaacaagtccaacgtttccaatataagagtcaattgatcatagtagctttatacatgattgagcgaaggccaagagtcttgatgaaggagaagttcgccgagtccgggaatccagaccggaatataccattatcgaccatcgaaaagttcaacggtggaattaggttaagttcatcaccgggaacttctagcagtgctgcagtagcagccggcggcggctgagacacgttgttccggtcaactttagctacctcgatggtatggaaaagctcaccaccgtcttgcttctcctcctccatagtcctaaactggttcatgctcatcgtcttctcaatcagtttcattctctagctaagaaagaatctaatgaaacttatatttgttggagtgtaggaatctgaagagatcttatcttgtttttgtttcttgaaaggttatggagaagtaatggagatggtcgttatgaatcgacgaccttgctttatatagacacgccatggtagagagagaaacctatgttgtcgctgttggacttttagaagagaaagaacataaaaaaagaaaaagaacatttggaggagatgaacgagacttgcgttttcaatcaacttttttaaattaaattaatgcaacaatctttctttgttttcgtcagaatatataatgcacaatctaaattcgattttgtcgaaaatgacaatataataaaaatgactcagagtgaaagtgaaaatacggctttattaaattgtaggaatgccatggtggggggtgggatacacaagaagcttattgagataccacaaatattttccaccccaaaaggaaaaatattcaattggtgacaaaaataaactactatagaagtttttattttagagcaattatcttacatatcgtgttaataagatatatctatatgatatgtgatttattacaatatctattgttatagttaattgtgttggtaaataccgacaaaaagctaatattggtatataattttatatatatatatatgtatattagaatttaactagtcaacaaaatcaaattgttgtttctcgttgtagtaattccatcaaccgatcgaacaattactatagatttgtaatttgtaaatcgatcgctaaaaatttaatgggattattatagatgttctatagcagtcccgtgttataaactatgctatactccatatatgaaattaggaacgctaacgctttctcaaattctctatatattaattgagatatattttcaaaaaagacttatcttcatgtatgattaacaaaaatgttatgttcagttgttcacataactcctcaaaccatttaagcaactaatgttctcctactatttttagtagtccatcaatatatattgtgaaaaacaagagtcaggactcaagagacatataaaagattgtatgcctgtacgggcctctcatgagctccgaaccaatacacatgctgcaaagtgttcgacaaaaaaaatttagtttttttttttccgtctatgtctatataactgttttttgaaaatgtaacgagattttatgaaaagaaaatactaaaataaactaatggagaaattgaaaaggtacattctatggaatatgcttcagattaggaaaggttttgggtcccgagctgagctgggctccacaccgtaaagagcttccgtattaagacttaagaatgtacagtaaaaccctaattttgtttcattgttactatttttttttacaaatcttgggaatatttttttttaaccgtaccaagcaattttagagttttgatctatagactgttccaacttccaaccaatattaaaaataggttcatacttctctttcgaaacagaattgaacgagcataaaaggttttatcaacaaacagaattgaacgagaactgaaactaataacatcgatataatactcagcaaataaaaatgaattttgtaatgacacttgagctaaacaaatgtttgggaactaatggctaattttaccattccttgctaagaatattttgaaaactaacattatttattggtaaaatcaaagattgatcgatataattgtcaaaaaacaattatccttatttggtaatcatttgtaccgttgatctcggtctatctctcgttctctcaatattatcccacctcatatttgataccatcattagaatttatattgccttgtcttgttgataattaaaacttcaatattggatctctttacttgattccatgactagtttaatcaaggaaaattgagttcatgtatattcttatatacatgcttaaaatttgttgtaatgttgttaacaccatgtcgttacacttgagtaatgttattagtagatagtggatattgttcttacacccattaaacttaccatatgtcagatactttattaacgcattttcaacttcgtttaacgattgcttcaatataaatttaaaatatataaatttatctgaatcatcacatgattgctaaaactcaaactacttgtaaaaagcagtttaaatactattttatgaaccgtccttaatcatataattaacagaagctaattaattaatgtcgagctacgcatactttaaactttctacttattggaaaacaacttggatagtgaatgtcagaatgtatacataactagtaattaccaactcgattactaatttggtcaaatgaaaagagttttgggtaaaagaatattattataagttttgaattattgttccactacttaagtggcttaacataagtaagtgggaatttgatgagaaacgattcctatctctccaattatttttcggttctcaagttggacactgtggaagaagtggagatgagaagccgatccaatcattcccacctctcttcaaacctaaaggacaacagactaaaaatcatatcgtataaaatatattctgtgtctaaatatattctttgtctccgcccatgtgaatcgataacgaatttatttctatttatagtgaaagtttgtatttatggcttttttctgtacattattaggaaatatagttctatttaacatgaaaaccaacgttcatctaattttgcaatttatgattaaaatatatttatttgattatttaagtaatattttaacacgcaaactaaaatccacattatattagctatgaacagtttatatagttttgataatcactaaacagcaatgccgagtttagtgattttgagagtatctggttgtctttattatactgtatgattttgtgattataccacaaaacaaaagtcgtagtaaaagtgttggctccaagtcatccacaccgacttttttttttctttttttatcaatcatccatttaccatttatgattaatctcggtgtttcttggtatataaaagttaaaaattcataggactcgtcgtgagaataaaataattagtagtgttattactaattgttgtactaatatatctatacttgacgtaagtttagtgacggaaaaatataaagaatacatcacatttagatttcatagatatatgcttgagtgactccgcctatattatatactatacgtattataaacttataatacgatgtgaacctgaaagaaaatatatgtggctaacgtgaaacgatatgatattatcataacaacgaaaattccaattatgtgaccatctagttactttaatagcctaatattgtaacatttctttagaacattgacttggtactgtgttttatttagttaattatataaactcaaaatattaacacacattcaatcttatccacaattcattttcatatataagactagccaatttctttattgatttttctgattaattactacgataaatttaagttgttgtttcgagtttataagatgtatattataagcaattataaattaaaacgtacaaaaaattgtaatttttttaagactagtttaatataattttttttgggaagagatgtatttcgctagcaaataatttctaaaagaaatagactaaaaattgaatctgaatatacagagactaagatttagacccgaattcgcggttattttttaaaaaataggataggtatcgaattatatgtgtagaatatcaattaacaaaaaatgttgtatgaaagtagttatttaatagaaagaaaactaggatttgatggctatggttgcttaaagggaagaaacacattagtgtgtccaattcgttgtgaaaaagtcgttctttccactcaaaagagattgtttacaaagtcaatgacttgtaacttagggaattagaaaaacctgtaaatagcattcttttattaagccacctaacctaattattatgactaagatgaccaagtgaagtatgtaacgtttttaggaacgaaaacaaaagacgaaaactaaaatgtttggccatgtgatttaaacttcacaaagcatgcatgattttatatagacatcatgccatccctagttgcgtatccaaatttaaaagggttactcttatagtattgatacgaccaatttatgaaaatgtgtcacacaatcactttgttatgagttaatttagaggtgttaagtaattgtatataatttcacttatgacacaaattcgtcaattctcatgaattttacattataaaatgatttttttttttcaatgatcttgctacatgaacatactaatgacttattgcatgggtcggaccttttgtataagccaaggtttgacttttcatgaccgattcacatcaccgcattttgattctaacatttaattatataaagtagaagctaagaaaccgtaagacatatctacatcactgatacaaattcttcttgaggagtgttccaaggcaagcataataatacaaagttgctttccaaatgatgaaccctacttttaataaattgttctctctctatatgtaactcccactaaagaacatagacggcaaatttgtttttattgattcacgaagctataagatcttttgtaatgtctactagaatcacgcagcgagtaccagaactttgatggttccttgactattcgcagtcaacatcgtgggactatcactcttccagcaaaccgcactaataaagtaggaacctgcctcttcctctgcatcgtccatgtctggcgatccaaatctgtgcgatgtcacgggtctcgtgatttcctgcatcgcatcattcacattttaaaatacttgagcaacgacaggttgaaaatctgtgaatcatgaatgaaaaatgctaaagttgagagcagaggtttcggatttgtgaaccttgtgatatacatatacttcgtttgtctcgcttccacaggcgagatactcgctgttcactgtgagacccacaaagttcttctcgttagtatgtcctctgaatgttcgaacctgaaaagtaaaattgaacaacatagtcaagacaagtttttctttttgactgaatctgcaagattggctcgggcagtaatctaactggcaagttgtctttgacatcccataagcgtagtgtgctatctgtggacgcagaagcgagctcgttgttggacaaaaatttaacataggaaactgctttcttgtgtccactgaagacatgaagtggttggcttatgtttcttagatcgtaataatggatgtgatgatcagctgatccgacctgtgataagtcaacaggcttaaacgtctaagtctctctatctaattaaagattatatctagagacgtgtgatagtgtcatgctgatcatgagtggtagcgaataaatgtgagatgcaaagttgaggcgtggaagtatataccgcaatgtagttgcttgagccaggattgtacttgacacaacatatgtttgctttcatatcaatattaatcacacttgcttcctgcctcgtgcaccaaactttaacctggatcaaacacacagcacaattggttaatctatgagacatgatttaacagatgcaataatgcatggttgaggattaactagtagtgaattgacttaaaaggagcccactggtataatatgcttttgtcagaattagaaatccagtgaatttttcaataacgtttaattaaatttggacaaatgaagctacaaaatttcaaggtaaaatctactatatacaagtgtccagtttcgtttgtttcctaatgtatagccaccacagatacactaaggggaaaattttgctgaaaatttaagaaaccaacaaacattcaatgtaggaagggctacatatgaccaatccccaagttgggaagaacaactcaaagaaaagtttaagaagtagtagaaaagattcatgagaacacaatgtactaatgagcaagtaggagattctccagttttgtttcacaatatgtctctttagttcgtcgtagaaattagacaaatccgtgaccaagttagttataagagctaggagatatctaaaagtagtattctttttatatgagacatagcccaatgtgagatgaaaggtgataacggaaaatatggagatatttaccttgcagtcgtcactaccagatacaagcattgatggttctgttcgtgaaaagtcaacactccaggcacgtttttcgtgctcttcatactccataagactctgcctcagtttacataaaaattcaaatacgctgcagaattcatgagatgaatatcttataggtgcgatgttagatactttgggtaaagtactcacctgcctagtagttacatcccacactgttactattccttcataatcactgcttgctatgtgatttttttcatgcttattccaactcaagcaactaagtttagaccgagttgacatctccacaatcggacactgcatatctgctggttcatttacaacctgaaaagtagcagccgataatcaatcagttcagcgtggtccattggataaaacagaaaattaaaaccaaaaatttgattagctttgatttatattcttctacgcaatacaaaagtgtaaaatggctatcttgcatcaaagctagaatttcccaagagcataacttagtttcattatcaacgaagctttcttagaattgagatgcatgatcagtttcacaaaagcataaggttggacaagaagattcaattggtatgtaattgaatgcactccaagatttatgaacgtaccgaagagaagtcaaaaacctttatacatctagaaacaccagcagtggcaaacagctcatcatcacgatcaaactctatgctgaaaaggaacagcaccctcttcatcagcaaaatcagtaagatggtacatcaaattacaggtaaactagaggtccaggcaaagcataaagcatgtaaactatggaagaccataaaccaaagcacatagagagaaaaagatatgagccccggagctcccagaccataaactaaaaatatatatctttcgtctcttcattgagaagagacactttcatataaaagatcgcaaaccgattctatatattccgacatggataaggataacatagtgttccatcttttagaaaattctcctcaagtggcctgctgactacacaaccttctccctaccatgtcagcagttttatcttcatactattcactggcttagaattacacagcaacgaatcccatagtaataattgcgtctatcaatacattaaacaaaacttaatcacttaagggtctattttgatatattcggagacattcttttggtacctatcatctgttatctgatcaacgaacaaggaatagaaaattcaccttgatacaatgttggctgaatgaaatatatccccatgccggatttctgctataactcttagacgactgtgaataaagagtgcaattaaaaccccaactaattcgaaaacactctttatgtacggctagaccgattgaaaagggatagtcactcctctacctgtagcgagtgaaggtagtcaacacagattgaaaatctgcaaggccgttgctatagccttccctccgtactacactcttatcattttcttgtttactatttggttggtctgccaactgacgccgcttttggaggtaacattcttgtaaatcattgaactacaagacaagacactttaacagaattaggcaatctgtgcatatatcaacaagcagttacagagagattaaaggaccatgcaggttttttcaagaaaactactataattgtgattgcatagtattcacagaactgttagtgtgtctagagaacatagtgactttttgttgctatagtaccagagagacaagaagcggctactatcactaagcagtagatataaagtccagaaagctatttctacttttacgtgcaaacaatacgaaatcaatctctctgaagtccaatcggctttttataaagaccaccaaaaatgtgggccttaatctaaggtatcttttccgtaagaagattcatcctctacccacaaccactttcaatttctcgagctgtcaatccagatgaccaagagctgagtagctaggcatggtagtaactgtaacacaatcactggggcctaattgtagtaattattcttattctttaatagacaaatatcttaaactttaatgccattgtccttttaccatttcagcataaagatgttgagtagacaaggaggaacaaacctgagcatgaatccgtttctttctagccattgagacagttgactgattcaaactttgcgaatctgacccactcagcgcatccttctttggtagcccatgagagcttccttgtgccttcccctctacctttttgttttgataattgcctacaaaatttcctcctcttatgctgagagaattggagttgaaaccaatctggttcttctcatgtggccatgcatttcttgtgcttggatcatctccgagcatccgcaactttacagaatatctgtccctagctcggtataaatctattctatgtctctcaacggcatttatatcttctttaatatactggagatcagtttgcacctacattaagatagagaagacataaatgacagaattctataatattctgagatctcatctaacattcaggggttatacgtctcatgaatagttggatagatcatacatctattgatagaaacatggtttatggctttcttttacaacaactatacagtctaaacccagtgaagattttgaagcaaatggaatgaagagcaacgagaataattatcaataggtagcccaatgctactccataattcagacaaaccaacctcatttagttcatcaactttttgcttccttagacaatgcaaaaagtccaaaagtatctgcatgttcctctcagcttcttcctgttccatttttctcttcctttccgcaagaagtgtcagaagattatcaacctccttaattgacacatcacaaccctgtctaagtatgaacgcaggaagtcaatatttgatcaaaagaaatgacttagaattgctttttactccaataataattctgagaaagcaaacttaaagaggaaaaaatgaaacataaaaagcttgttaagaaccgaccctttgtagtgcttcccgaaactgatccaagggcgatgcagtttttgacacatgccgagctgaagttttcttcaatagctacacaattgatacataaacgtcatataataagctgcattccagtgataaatagtttcaatacactatcattcctataaacatgcttctatttagctgtaataagcagaatcctaccacaatactacacatcaaaaacaaaacaaaaccttcctaagaaaatctaatggcaaggttcattggaatcgattaaagactaagctagcttacttgtttccacaaaaaccacgacaaaaaccaaacttgattacaagctaagactcaaacaagcaacacccgaacttgaactgaaaagctaaggaccaaacacaaattacgagtaaaattagaaaaagaaaccttatcgagcaagaaattagggtaaagctgattattggtgaggtgttggctacaacagggacaatcactcttgttcctaagatgtgtgatgatacacatatagcagaaactatgaccacaagccgtgaggaaagcatctttaataatctgcatacaaatcggacaaagcaagtctttatccagatccggtgctccaatctcagaaccgccgcttcctccgtcgtcattttcatgacgattagcaccttcaccaactgaagatgttctcgggtcaggtttcaccgctggaacaaccggatccgtcgaaatctcttccattttgctttcaaaagatttcttcgattgtgattttggtttttgagaaaatcggaattgtgagaaaagagtggtttgggtatgacgtcggagatgaaggaggagtgaggctgaggtgtggtgggatccaccgtggttcttttctgaggtgacaaatcctacacgttctggtctacgcgcttcttttcgcgcgtgtgtctggcgtttctccaagcgctggtacggtttaattatccggcttctaatttatagtccggttcaatgaaatttcttacaattaccacgacggtctaatttaatttcttacaaccattcattttatttcttactatttgaaatgaataagttgggaatttcaatccattcaaccggagcataaccctagaaatagaataagttttgaaggattcggtttaataattttggaataaaccatttttatttcagttcttaaattttgttactgtaaaaaatgactgaaaagtgaaatatattttaattttcccatcactggaaacgttccctccattcttttgcttgtctgggaaacccaaagagactgtgacggagaagagaaatgagctaaataaattcctctctttgattcaccggaaccctagaaatcctcttcttaattctttcaaaggtgcgctgttttcactagatatcgctgttgtaattgttgttgattcggagctaggttttgtttttgtctctctttcggagaatttgcatgaagctaggatttgtctgttgatagttgtatggttttggctgcgttgtttctctcttgaaagtcttgttatgctactgtatgacacactcgaatgagtttttgtttgtgtaatgtttctcaattttgaaggcgaccaacagttaaaggtgccattttttttccagattaagtttgttcctcatctgaaatttataccatttctcgcgatttagcaggatatgcccagaaattaaaatcttagaacgacaatggtggtaaagtttttagctttttaccttttggagttgtcttcttaatttggtgtttttcttttctttcttagtctcctgagcattgtgttttggactggtttttgcacactgtaaccaacctccacttttctctcttgcagattattttcccctggaaggatggagacatcttcatctctgccactgtcacccataagtatagaaccagaacagcccagccatcgagattatgacatcacaactagacgtggggttggaaccacaggcaacccaatagaattgtgcaccaatcactttaatgtttctgtgagacagccggatgtagtattttaccagtacactgtaagattcattagtcacttttctgcattctttcatcagtgtctgtgcgtgtgtgagatgtttgacatatcggtaccttttttgcaggttagtatcaccacagaaaacggtgatgctgttgatgggacaggaataagcagaaagcttatggaccaactattcaagacttactcttctgatcttgatggtaaaaggttggcatatgatggagagaagactttatatactgttggtcctctaccacagaacgaatttgactttctagtcatcgtggaagggtcattttcaaaacggtatgtccctcttatctggattgatatttaatcgtttcaaggtgtcaagatagatcttgttgatcttctaactaacgcagtcttgttaagtttatagtgattgtggtgtctctgatggtggtagttcttccggtacttgcaagcgatcaaaacgttctttcttgccaagaagttacaaggttcagatacattatgctgcagaaataccgttgaagactgttcttggcactcagagaggagcttatacaccagataagagtgctcaggatgcacttagagtgcttgacattgtactgaggcagcaagcagctgaaaggtaaatctttctatctgtttgcttttgtgcagtttatatttttattaaaatagatactctacgttctaatggaccaatttttattatcatattttcactttgttggtgaaatttaatcaatgtacaactatttgcattttgtgaccatgctcgatgcttactatagaaaactgttgataatgcaggggatgccttttggtcagacaggcatttttccatagcgatgggcaccccatgaaagttggaggaggtgttataggtattcgaggtttacattcgagctttcgtccaactcatggaggactctcgcttaacattggtatttttcagtatacctttctcatctccagctttcataaacttgtcttaattgtggatagttttattaataagcaaaactgttttcgttttgtgatggtttgcagatgtgtcaacaacaatgatcttagaacctggtccagttattgaattcctgaaagccaatcagagtgttgagacaccacggcaaatcgactggattaaggtagttctggcttttaaatgcaataactgagaacatgactggctgcttttgttttgagcttgtgaagttttcattgaaacttggcaggctgcgaaaatgcttaaacatatgagggttaaggcaacacaccgtaacatggaatttaaaattataggtctaagttcgaaaccgtgcaatcagcaactgtaggttccccatgattgtactatcaatatatattttgtcctctttttcagcctttgcttgactttcttcaccgttttccaggttttcaatgaagattaaagatggtgaacgtgaggtacctattagagagattactgtgtatgactatttcaagcaaacctacacagagcctatttcttctgcgtactttccatgccttgatgttggcaagccagatcggcccaactatcttccactggaggtatccatctccagcagtgtttccttcgttaatttttttgtagtctcttatcccacttctggaggtgtgtatgtttgaacttctaattcttttcttgcagttttgtaatcttgtatctctgcaacgttatacaaaaccattgtcagggaggcaaagagttttacttgttgaaagttcaagacaaaaacctctagagagaattaaaacactcaatgatgtgagcttcgttttctgacctcggatgatgcttgatctatcttggatggcaaatactgttactgactagaattgtaggcaatgcatacctactgctatgacaaggacccatttttggctggatgtggcatctccattgaaaaagaaatgactcaagttgaaggccgtgttctcaagcccccaatggtaaacctgtttatgttttgtttgcagatagaaagatatgatctaccatggaaattatagtcccatattgacccatttgtaatatacagctgaagtttggcaagaatgaagattttcaaccttgcaacggacggtggaactttaacaacaaggtaattgtctgcaaagatttccgggcatcactatttcccttttatttttaccctttgtttcttgctttacagatgcttctagaaccaagagctattaaaagctgggctatcgtcaacttttcttttccatgcgacagtagtcacatttcccgtgagcttataagctgtggcatgaggaaaggcattgtaggttttgtagatactgtctcaattttcttatatggtttgtagtgttgttctatggttattgacagagtctgaatatggtttgttaatttgcaggaaattgatcgaccttttgcactagttgaagaggatccacagtacaaaaaagcaggtcctgttgaaagggtagaaaaaatgattgcaacgatgaagttaaaatttccagatcctcctcattttatcctctgtattctgccagaacggaaaacttctgatatctatggtattatctcacctttttcctgcggatattaaagtttgaactctctcattcaactggtcgttgcatactataaaggtccctggaagaagatatgcctcactgaagaagggatccacacacaatgcatctgcccaatcaagatcagtgaccaatatctcaccaatgtacttctgaagataaattcgaaggtatatcaccaaccacgctaacacttgagatatcttcttttgatgtgttattctctgtgaattgacttcttttcttccgtcttaatatagcttggaggcatcaattctctgttgggaatagagtactcttacaacattccattgataaacaaaattcccaccttgattttgggtatggatgtatctcatgggcctccaggtcgggcagatgttccttcagtagcagcggtattgattacatgtcttttcctttgtatgttcattgtatctggttatcttaggatctgattatttatctgtttactttctcgatctctgctgcaaggttgttggttcaaaatgctggcccttaatctcaaggtatagggcagctgtaagaactcagtcaccacgtctggagatgattgattcgctcttccaacctatcgagaacactgagaaaggagataacggtatcatgaagtatgtgaaccctagttttaatcaatttcaacaactcaagatgtttaagtctcttcttcatgtttaattattcgtttcaacagcgaattatttgtagagttctatcggacaagcagggcacggaaacctaagcagattatcattttcaggtattagcaaaacatttactgtttatctttgttgtctaacctccaatatctaaaagtctatccttacacaaaccttgggcatttgatagggatggtgtgagtgaatcacagttcgagcaagtcttgaagatcgaagtggaccaaattataaaggtcttgtttcaaagtcccatggctggttctggtttcaatctattagtcaaattgtagtgaagatattatttaacagttttgcttcttttttacatggcgcaggcgtatcaacgtcttggtgaatctgatgtgccaaaattcactgtcattgtggctcagaagaaccaccacaccaagttgtttcaagctaagggtcctgaaaatgttcctgcaggtaaaaaatactttttattcttcacccgtcactaggattccatttctttccgtaactatttcatcataaaaaaaacaatgtcgtttgtcaggaactgtcgtggacaccaagatcgtacacccgacaaactacgatttttacatgtgtgctcatgcaggaaaaatagtaagtgtagacaaaagtttagcttcactcctcgcacctttattaaaatcaacgctatataatgtttccctctatgatctctcagggaacttcaagaccggctcattaccatgtattacttgatgagattggtttctcccccgatgacttgcagaatctcatccattctctctcctatgtgtaagttcactccttaacgtcaattacaaaaaccaacttagctttaccatcactaagatctaattgtctcgaatcatcatcattccagcaaccaacgtagcacaactgcaacttcgatcggtaacactccttaatcaaactctcttctataaataaaaatgcgacctcctcttttacactatacagaaactactcaactcaatattcaatgtgtcctctcttttgtgtgtgtttgtgctctcagtggctccagtacgatacgctcatcttgcagcagctcaagttgcgcaattcacaaagtttgaaggtatatcggaggacgggaaagttccagagcttccacgtctgcacgagaatgtcgaaggcaacatgttcttctgctgagtacatataagtagttctgcttcctccctagtctaaacccaaaccctcctctttagaggaagtttatcattttgcatatatgcaatcatcaccgtacagtttcattagaagtaagaagaaagatcctcgcgtagattaagaggctcattggcttattgatagcccaagtttgcttactaaacggcagcgatttttgcgtttagcttttggatttttcaatacgttatattaaattttcttttttgttttgtgacgggactcacaaagggaaatgaaaagtgagaaaaactcttgacgtaaaagtctttcaaacggtcaaaccggtctaacaaaccgcgtcaaacccacgtgcactactagaaaactttgtaatgaagtggacgttaccacagacaatcaccacctttcagaactgtttacgtggtacaatatagacgggtcagaatcattgctcttacactactcccgagaccaccagatcattaccactactcaatttttctccacacgtgggtcctacttggctgcgatgcaggagatttcttgtgcatgactcaaacttgttttgactactttgcccctcctctctttaacttgttttcttctagtttacgacgagtcaagaaactttgccttggtcccaaagcctgttgtctattttatttccttttaaaaaaaaaactgtttacgaatcgtgtctacgtttttgtccctcgaagaaatctaaagccggtttgactaaactggattctatttattttttaattattatttgtcctacttcagaatcaaaagtttaaattaatacaactcacaagtaaacaaaattgagatacttattgcaatttgagtataaattaccaaaccatcttataagataaaacaaataaacactttatattttgtatcagaataaatataatttgacgaaggacagaaaaggattacaagcatatgtatgtaaatcttcttcgtgtttaagctcctaaaaaaaatcttaacttgtgagttcagttatataattagattgcttttaagacaataatcctagttgtaaacctgaaccctatagtctatagctaagtctacacttgtcttgtgccgaattaaaaaatgatagtatgatacaatgcagcaaaaaggtctcttggtagattctgccaaactgcattaaatgtttttattatttattcttttttaaacccaattgcttgctatatcgtgcgttaccttaaaatcgaaatttaccccaaaacaacaaaacaaattggtcgtaattctaagagattcagctaaaaacaggttttgaagagtactatcaaaccgatttaacaactaattagatgatcattaaatttatgtatttttgtttgtaattagacagtggagttgattcaacattcacattcgatttgtttttaaaattttaactcttaaacctaatttatttgtattagtttggaagcgaacttattgaactcatgatttagatatagattcgaactgatggatagaaatccaaaatattatagttcatgattatttgagttaagttcctttcacaaaaataatttaacttacaatctaatttcttgcatgttaaatttcataacgttttctaatataaacataaacttattatatgaaagtattataaaaactaaactaaaattcacgtaaaagaaaacaaactggtggcctgaattttgcaattagtgtgcattcttaatcaatcgtactgagtacaacagtattggtcattaagcagctacaaattaaggaaggattcagcgtgggccctacagcagaattaaactggtccaaaccgcagattagcgtacgaagaacattttagtatgaggctctattttattaaaaaaaaaaaagctcccttaatctttataaatcagtattttttacctttctcattaaataaaataccgtgtagctcacgctttcctttttatcctttactccacactaaatgacgaaaacacccatcaatttcttttctttctctctctttaacttaataataatatatttatatttcccctaaattctgaatttataatgtctcatagaagaaatagtttagtttctactttcaagtttcaacgtagttttttgtattgtgaataaaactatttgttgtggagtcaattgtaaaatggggtataattcaaatgctaaacaaaattagagtcgtttatcaaatagtagattcatttgtagaagaataaaatataataatgatgtaatagactacaaacttgtcttagataatttcatctctaatcaaatacatgtttcattatattctgtttgttctcataataacatcttggtaaaaaattgagcttatatgtcaatgagacataattattttcataaaaaaagttatacagtaagtcttaattaatttacagcattagttacaatttggatcaacattaagtatcttttaatgataccatcaatttgtttatagagatcaggagtcaataaatacatttattcattcagcataatatagttggaaatctgtagaattttagtgagaagatataataattaagaaaaggacccacgcaccgtcatttagatacgcgaataaactgctttcaaattaggtgtgtcatgtgtgattgcatattaaatgttaacaaaccttaatttggccaaaaaaataaacaatttacaacactaatagacttatttataaaaagatcagaatatgttgataactagagataacatttaagaaattataatcactttacattcatattaaatcataagtttatcactattttttattgaatttagtgctaaaactatgtgctagaaataaattattttagaaaagtatgttgagttattaattatgaaaaaataaatactacattaagattacattatacaattgaaaagttcagtattaactctattaagattaattaacatataatagcttttttaggcagcataatttcatttgtttaaattaaaatgcaataagagaaaaaaaattaatttttattaaataaggttcccaaacaaagaagaagaatagagggggtcccacaaggtttgtatccaacggctcagatcgaaccaacacattgaaaattaaaccacgcgcaaacgagttaaaggaacatataggggtaatatagtcatttcagatggaccggcagaatttattaatccgtacacggggggggggggcaaagactcattactcagcactgttatttttattttcattatattatataaatgcaatatttgttattatattattatttgatctcgttttcacattgaagaagaaactcttcattacattgggagaaaaaaaaagaggcaaaaaaccaaaaaggaagatccgaaaattttcccacgaaaatctcagattctggggaaaaagaaaggaaatcgccaagcagagaataaggcaaaatttcattcctattggaatatttgggctgagatttttctcttttcttttggatttgttcaaacgataaatctatctttgggacacaaaaaaaaagttaaatttaagagatcgttttttattcttttcaagttttcacattttgttcttcgtttgatctttcatcggaaaaaaggaaaaatcttattttccttttgtgtttgtttccttttcgtttgtttgatcattgtgatcatcgtctctacttacatacaactcataaacgattttttctcagaggattagagacgagttttgattttgtgtctgtgactgtgtttgtttcataacgagccatgtcggaaactcagcagcaggttcagaactctactgggtcgattcgatctcccgacaaaattgaaggtagttactctcttttttttcattgaagatccaacgaaacgggttttttccgtaatgtgtttgaagatcatataatttctgttgttgtttttgatcattcaagtcttattgtgatttcgtttattttttctgagagttctgatcattcaagtcttaaaagttcgaaaatttagagttttgtctttttggagttatcttgttggattcgtcttgtcggatcattgattccgaatgcttcttctacatttatggaagttaaagatcatgttttttttcattgtgtgatattgttctgattctgattgctctttgtcggatttaaagtttgacattgtctttttgtctttggaatgtggattcttatgatttgagtttggtttttcttgttatttagatatataatgttcttggtgttatgattttgtagataccttcaggaggatgaaagttaatgaagacaatatggagcaatctagtccatatcctgatcgtcctggtgagcgagattgccagttctttctgagaactggtcagtgtggctatggaaactcttgtcgatacaatcatcctcttactaatcttccacaggtgagaaacttagtttatatggctgaatcttctcttcatctttcctgatactcgagcttacagtttgtaacattttgcagggtattatttattacagagaccaattgcctgagagagttggacagcctgactgtgaggtgcactgcttacattatgctgcaaaacataccttgtcttgagtctttccttatttggaaagtgttaatacagtagtttggatagttgatgcaccgtattgttttacttttctctgaagatgtttaacgaacattttcctcttctgtatgcattttctttgcagtattttctgaagacaggagcctgtaagtatggcccaacatgtaaatatcaccaccctaaagacaggaatggtgctggacccgtgctgttcaatgttctcggtttgcctatgcggcaggtaagattacatcgttgcatatagcctgcttttcatccaccagtttcatacttgatagaaaactttatatgtttcttctctctccagggtgagaagccatgtccatattacatgcagacaggattgtgtcgattcggagttgcctgcaaattccatcatcctcatcctcattctcagccttctaatggccactctgcatatgcaatgtccagctttccgtctgttggttttccttatgccagtggaatgacaatggtgtctttgcctcctgcaacatatggagctattccacgtcctcaagttcctcagtctcaggcctatatgccctacatggttgcaccctcccaaggccttttacctcctcaaggctgggccacttacatggtaagtcttaaatatagtttctcagtgcatagaccttgctttctctctgtgaagttacaataaatagacagagattctgcttttaacaaatttcactttcttttacaacattcctattttgcaatagattgtcttaatctgaaaattctctcttttcctttttaccgtggtgcagactgcatctaaccccatttacaatatgaaaactcaactcgactccagttctagcgcatcggtggctgtgaccgtgacatcacatcatcacagtttttctgaaagagctgaatgtaggttttttatgaacactggaacttgtaaatatggtgatgattgcaaatacagtcatccgaaagaaagattgttacaatcaccaccaactctcttgaaccctattgttcttccagcaagaccagtaagtctcttgtccttctttgttattttttgccaacttgacatttccgcaactcgttctgtttattctgttaaagccaacaagctttggtgacactaatttctctcattttgctgtgttcagggacagccagcatgtggtaacttcaaggcctacggattttgcaagtttggagcaaactgcaaatttgatcactcaatgctgctaaacccttataacaatacgggcttggccatgtcttctctgcctactccttatccttatgctccacctgtttcaactaatttgaggatctcatcgccaccaagcccctctgatatgactaccctatccaatggtaaacccgctgctgcagaagctcaaagcttggagactgagaaacaagacgatagtccaacagaaccagaaaaatcagaagtggaggactcattgccaccaaacggctctgattcaacctccctgcccaatgataaacctgatgcagagactgagaaacaagacgatgattctgcagaactggacagctcaaaagtgcaggattcatctgataaatctacatgatcacgatcatgatctcacaatctggcagagtctttccctgtcaggggtatctaacggtctcaaaatgatctctctgccctttttgttaatttttttggaaagagggcttggaaatgttctatctttttttttttttttttttcttcttctttggtttcggagacagcaatggctgaaacaaaataggaaaagaacagtgttttgaattggttaataaaacttgacatcctttagcacaattttcagattctcaacatatcaagttccatgatttttctatttctttatcaaactgtatattcgatttccttgatgcagcaactagaaaatgttgaacctaactagtttttggaacccaacacaaatagtaaccctctttctgagccagaggcttgcctagttaatgttacaaaagaaaacgaagcgacatcttatgctgatgtgtcaggatattattggttagactacgtaattccacggagcttgtgttcttaaatctgctgcttcgcaggatcgcgagagagaaaaggatacaattttacagaagaaagtgaaaagaaagagagaaaggggaagaagaaaaatgtataaatcaccattaacgttgctcacacttcttactatttgttttggattcttcgatctcagcagtgctctttatggatcttcgtcacctgtggttcagctcactgcttctaactttaagtccaaggtatgggctctgcatcgatttcatcttttggtgtttctgagaatctctattggtttatctgtatagatccggtttagctgctaattcattgctccaatttgttgattgttgtgattgtttgggtaaaccgaaaatgagaattgatgtgaaactgtgttagtgttgataacttgtttcttgttgcaggttcttaattcaaatggagttgttttggtagagttctttgcaccatggtgtggtcattgcaaagctctaacacctacatgggagaaagtggctaatattctgaaaggagttgctactgtggctgcaattgatgcagatgctcatcagtctgccgcgcaggtttgtgatgttgataccagtcagctaaagtttcaatttttccatgtagccgttgcttgtgaatcatacaagaaaaaaaaaaacttttttactcactataatgcacaaagctcaggctcaggtttgtgatactgatgatgtactctcttgttcaggattatggtattaaaggtttcccaacaattaaggtttttgttcctggaaaggctccaatcgattaccaaggagcaagagatgccaaatccattgctaattttgcttataagcaggtttgtcatatgctactacttgattcttcattacactcttttttactgtcaagaaatttctcatcctgtgacatgatcgggtgtatttaaagccccagtcaagatgttcttgctacaacaaacgacctttaccttgttatttcttttggccagataagcagataacatgttctgatagatatgccatagttatgtagaagaagttttatactttttataccttcttgaagctaagtactacaaacatacgttgtggaatcacactaattgtccatcaaacaaaatatactacttagatacgttgtggaatcacactaattgtccatcaaccaaaatatagctagtttagtaaaatttgaatatgaattgaagaaccacaaatggccatcttaagttgcactgcagatataacattctccatcaaacaaacttgtgtacctgcattcagataaacatattgctatttgcttgcattggcagatcaagggtcttttgagtgaccgtttggaaggcaaaagtaaaccaactggaggaggatctaaagaaaagaaatctgaacctagtgcatctgtggaactgaacgctagcaattttgatgatttggtcatcgaaagcaatgaactttggatcgttgagttttttgcaccttggtaagttgtccttatagagccaatgaactggtcatgcctttgaacttcttcggtacatctgaaggtgtaaaatatctttctttttttcctttcttcttaaaggtgtggacattgcaaaaagcttgccccggagtggaagagggctgcaaaaaatttgcagggaaaggtgaaattaggtcatgtcaattgtgatgttgagcaggtaatcactagaaatccttacattttattaacttggcttcagagataatttctatggactccttcccgtctcagcgttatactgattgcttagaaaatttaccatatttacagtctttacccgtttttatctttgaatcatgaatcctgatcagctgccccaccgtcttattttttgtatcaaaagtcttgttttcattattctcttgatgagttctgacttctgaccaagaaccttatatattgcagtcgataatgagcagattcaaagttcaaggattccctacaattttggtatttggtccagacaaaagtagtccatatccttacgagggtgctagatctgcttcagcgatagaatcttttgcttctgaacttgtggaatccagtgctggccctgttgaagtgactgaactaactggaccggtatttttcacatcctttgtttcgtctttaacattatttcttaaatactactagactcgaatccaagacattgacacttgttccattgtggttgtataggatgtcatggaaaagaagtgtggttctgctgctatttgctttatctctttcttacctgacattcttgactccaaagctgaaggaaggaataagtacctcgagatgttattatcagttgcagagaagtttaagaagcagccttacaggtatactaagaaagattataacctctgtgctgtggcattgtcttgttctcagttagtattaacggttacaatcagcagagagaggtttagggttctaatagaagtgttaggacttgctgtgagcacatatgtacaagcctcgttatttttcatgcacatctcatgatattatcatttcttaaggcataatgagaatcttatgtaaaaatttcatattgtctgcagttttatgtgggtggcggctgtaactcaaatggatttggagaagcgagttaatgtaggaggatacggttatccagcaatggtagccatgaatgtgaagaaaggagtatatgctcctcttaaaagcgcctttgagcttcaacacctcttgtaagtttggttcatctagggatcacaatggtttaggtgattttcgctcttataacacggtaatcattgttcgtgttatttcatcagagaatttgtgaaagatgctggaaccggtggaaaaggaaatgtgccaatgaatggaacaccagagatcgtgaagacaaaggagtgggatggtaaagatggagagttgattgaggaagatgaattctcacttgatgagctcatgggaggtgatgatgctgttggttctaaggatgagttgtgaagaatccaaggggattttgctacttttgggatctgaaccgctgaatgtatttcacccttttttatttttgaaaagaaagtaagagcatttcaagagatagaacatgtacggattttgtattacgatagacacataacagagaatctatgctggagttatattagagttcattgctagtttttcagtggagtttcatgttatccttgaagcaatccacaacatgcatgtcgatttgaggattttagtacctatatcggatttcttcttatatcaactaagcactatgaagtatcaatcctcttacttctggcaatatgaacaggcaatcattgactagtattcttggttctagcactatctattagatagaagagatattatttgaagaaacccactggtataacgaccaaatttaagtcgaaccctttggcagcaactctttagtatccatatccaagatacattaaacatcagataaattcaaaggaataggagaattacacattctgatttcagcggtgagaataaggcaaagaccgagaataagcataccgggatgttactaacgaaggcggaagctcaggttcagttacgcttgggtatctttgtgatgatcggtagtactcagccaatgaatccggtgttacataccgggaatacaggtcatcatcttgtctacctggagaaaccatgtatgtccttggtggtctttcaagagcatggcgctcacaaatgtaatacggatctctcctgtaggaatccagagtaaccgctgaatctggtgggtcaggcgagtttcgaaccaagatttcccgtctagaagtaagatgatcatacgtctggtagtctctctcagacaaatgagggtgacgaacttccctacggtcatgcctctcaatctctgcttgtctcaaaagccggtcatggtccatagatgaacggtaagaatccaaatgaacacggtctcggttgacaatgtggtaagaagaagaggattctggaggtggaatttggtaatgctgggttgtttctcctcctctcaagccatatgttcgatactccctttcactaagatataaatcacgcggttgttcttctctgcgtggaggaggtgaagcacgtcttctttcatgtttgcgtgttgggtgacccctactgctaccaggggcataccggtctctatcagatcttttcctgtcagtatcacgaggaacagggatttgctgggtgtgggtaacttgtgcagggatcgcagctggccgaaaaagctttttaagcttaaatacctttaagaacaccataatagaagagacgaacagagtgattaagacgtgttaatagtaagatataaattagagaaaatgatgaaaatatgaaggtcacctgcttatgagtcaattctgttttgaacttgtttttattattgtagttctctatgattgctttcttgaattggctctcagccaatgggatgcaatcactaaaaaccttaaagcgcacctgaatccaaagaatatcatcatctagatccgtaagttaaataaattccgacgaaagaaaactgatatcatcttcgagacaagttgtacaaatggaaaacggctaacaaacatgggtgacacacaatgttacctgagcaggaaaggatccaccaaaagcattgcgctcaagtttcataccaccagcagaggatgcttcaaaaattccatagaggagtttgagatcataatcataaagaaaaagcttaagcccaggcttgatacccttgacaaaatccttccttttctcttgtacacccattacactgaaccgaaaacaatcgggtctagtttttgtattgcacatgaagatcaatccaccaatctttactttcccaggcccatccatttctcttttctcagggtcaaccggctgctctttcctctcttccattccctgttctgttgtatcagcaccagctactacatcttgcctaagtttcttgtttgaatctctaacctgttttgttggtctcttccttttgcgtctcttgtcttcagtcaagccagttttggcttctacagaaccgtcaatagctttcttagctacgatcaagtttcctcctggagaagctccgacgtctctcttatcaattgcactctctttatccatcccctgagcaagagtacctttgaattttttttccctttgtctcttagcttttccctttacctcttttagtgtttccttaccagaaggctcccctccaacaactttaacatcaactgcaggttgagtagctactgctaattctttctgaaattccatatcgtttcctccaagatagggttctgaatctttgtccttttcgctttcgccaagagaaggctctccactttgttcaccttccttgatgacattctcctcaccagccacctgagcagcagtgccttttataattttcctttttaccagcttctttactttcttaacaattttagttttcgctggtaaaccctgaggctttttcattccagaagaagttgcttcaacagaggcaggaagagaaggttcttcaacagtcacattttccgtatcattttcctctaccggtattttgaaggtagccaaatcctgattggtatccaacagactttcaacaaactcgtcatctgccttactttttcctgaatcaacgggttctacaacctcattcccatccttttcctcagcttcaaccactacatccccattgttcccggaaacttcatcattctgaaccaccgaagcctcaggggctttctcattctcatcattcatagcatcttgtagttccattttcaaggaacaagcagatttcaaagcttagtcgctgcaacataaaacgaaaaagagatcatgaatcatatggtaaaagaaacattagcaaatgattattcaatgacatttggcatcagaaagattctcttctcataattccaatctccaaacaagtagattataatgtcaatgtcttacaaaacagtaactgaaacaagaagattgtaattaagacagcaattaagagatgagagaaaacatttgctaaagtctctgtcttttttttcatcacttgtaatcttaagctaatcaattaaatcccgaaaaggtttccaaatcaagaaaatgtaaaaagactgtaattgacatgtatagagatccgggcagaatcaaaatgaataagctcaaactttggttaccctgaaattgagattgatttgaaacaaacccgaaaaggaaaaaaacaaatcgaatctagagtctgctcgaagaactcttacagaatcgaagaaagagcaggatttctatgacgatgatgatgatgtttctccaaatccgcggcacaaggttctgattagatctctagaaagatcttatcacaatcgaatagaaagaagaaggaattgaccaaagagtttagaggaagaaagcttgttcctttatgattcttgtttcttcctctgttaaaaagtctggacttttcacttgtttaaaaggtactgagagacgtgcttgaagactagcgagatcagtcttatagagttttctcgttgagatcaattttggattgtagctgttctcttctctcttcattactttcaaaagccattccggtggtgatgtttgaattggttccacctctaaaggactatcgattttgagtctcttgcgagtactctcttctttgtccatgtggcgacgtttcttgaagtgggtaacgcaagaggaagaagaaggttcagattccgggttagggttttgtagttcagatgatctctgttgttcgatcacacgcgtccatggtgttatcgtcttgttagaagaagaagatgatcggtgagttctgttctttctaggtattgtatctccaaagattcttgcttctgtctctgtatcttcgtcaatggtctttgacttgtgttcgtcatgagtaccgtactcatgatcgtaaaccatgacagcgacttgtatcaacatctcgaagtttgagaattcactcgactctgaaaccctaggatcatcagattcatccattctcttcgattctctggaagacatgggaaattgtaaaaagaatttgtaacgttgtacgcaagaaacctaaagatggggaagaagaaagaaagaaagagagctagaggaaagacaatgagcgtgagaatggaaacttgaaagtaagagagaaggtagagatagatagatgtgtggtgttattaaatagaaatatatgacgtcatctcaagttcttgatagatcactaaatctaataagatcttctaatgaaatttttccttttcgggcccttaattatgaccgttatgtgattttgttaacattttaaacatgtggccaacataaggaaaaataccaatgtcgacaaaaaaaaaaaaggaaaaataccaatgtctcttaactctatttcttaatgtaattttgttggtttatgagaccaaaatattttcctagtgttcataacttaatattagtttatgaaatagtttttaatataatattagcatctaaacacatcatacattatatttgaataagtatatcaaaagtttaatttcattgaaaatcattgtatcaataatttcatagaaatatttagtgttttcatgtgttacggttttcaatatcctatcagtttcttcttttttatttttattttttttatattagtttcttagttaagggttttcaagtttttagctaactggaaaatgcaatatttggagaatttgtaccggaaaattgttgttacccagagcgttttacttgttgaatctaaagcccaaatgtacaacaaaatctggaacacgcttttaaacctaaagttttaaactcatcagctaaaactctctttacatatatattcttacacaagagtgcgtcgtcgatgttacaagctgctgacattaaaatacctcatggctcttttgccaaaataggctttcacttgcttcttctcacaagtcttgagttttttttttaagttttatcatttccaatctactggttaacctcgtctatcctccataagcattcttttctcagcggcgaatctgtaaatatagctttgatgaaatcttgtacctgtaaccaagtacattccaaaagctttcagaatcaccataaccaataatcaaagatccaataatcaccataagaaatagccttaatccatatatcaggtagtaggacacgaggtcaaacgatttaaaaagattgtacctctgttcttgtgaaattgcatctaaataactccccgctttcccaagctgaagttatagacatgagaggcatatccaatagttctggaaaatgataaacaataagaaaagccatggtaagaaaacttcgctgcgccaatgtcaagttagcaataaactgagggatatttaaaagaaaaaagaaagaaaagacatgcctgctagtttacgggttttgcgcaaagatggtatgatatcatcaagaggacgagaagtctcatctgcagatctcacggaatcgagtacagaagatagattcttcaacatgagataaatcagtttttgtagctgagaatatataagcaaacattttcattacgcagttaaaatataacattgcagaagcgactagcaaggagaaacagctacctcgaaagtttcgtcagcagccatgtcgtctagaagaagaatatctctagctattctgcgaaatacagactccaaaactgcgcacatgctttgcttgtaagttttgggccgtaagactggctcccatatcatatgcacattctttagactaaagacaacctataaaacaattgcattttcctcatataactgacactttattggaaagaaggtaagagaaaagcaaacaatttcaagtctgtgtgtttacctgatcaatgctaaattctgcagatttaaactgtttaatttgatgagtattctgaaatccatctgcactatctatagcctgatcgtagatgcaaaatgttagacgaggaatcaatactgagtacataatattactttgtaagatttaagcacagttttttccacacagattcacctctcgcagacttgaaattactagatgaacttgtttttgcaaaacttcttcggccatcagtttaaatcttggggctatgtcagcaaagactgcatactccttgatggagctagggaagctagcacgatactgtgaacaaaaaatgatgataaagtcagcagaaggggataattataactttcacctgtcaatgaaaaggatgcttaagaagacaattacttaaccgaaaaaaagaaattaaaaatagcggtttatcttgcttaagacacattgttcatacctcaaaagcaaggccaagtatctcttcgaacaaatatagacaatcgttgtgcagaagaacagcagcttcattgaggccatcgagttgtttctctagcttcacatttcaacggagtaaggaaaaagaagaataagaatttgtgcatattggtgagaaatttccatgtgacgacagtcactatattgattcagttgttaaatcttcattgaaaactatttttttactgaccttgacaggaacaacagcttcatatagaaggatagaatctctagcagcgttgtagaactctgaagcaacccttgcagaagaaacacagacatcctgtataaaaatgagtttattatcccaaccgtgtctggaaaaagcttatattgaattgcaaaagtctgaaaagagccacctcgagcgtcttatgcaccaaattcataagttgagatgcagcttcagataccacacacctttcagaggagaaaagtaagcagacgatgtgcttggcattcctcatagcaatatcctggaaaacggagttcacaatcctgatctttcacatgaaaaggttaatgcggtaaatatgacatgatgatgatgaaaatcaaaagcccacctggggaatcgtaaagttacactgcaacagcaaatttcttgcttttgctaggatttctatcttctttctagatgcaaaatgaacctccacatcttcagcatatttgctgagcctactctctgcgtcagatgatgaaacaaaattcagttcctttagagcggcttcgaattgagaggtccgctcgataattttctgaaagtcagcaagttttgaagcatcttctgggacaacctgactccaaagaaaacaataacctttaaacagactacaacagttaaagtacaaaggagaagagtgctctcacaccaaagaaatttctacaaaatttcacaacttcacgagttctaaaagcaaacctttgaaagaaatttagatataattaactctgatatcctcggccatgtcaacctcccaaaagaatggatccatgtaacgtttccaaagcacaaggaactgcaaatgaacttaacaaccttaagaattccagaatacattgcatctccatccacatcttcaaactgcattattaagtgggtaagtatttaaaggttcagaagacatagaccaaatgcaggaaatataaaaagcacataatctatataggctagagacaaagaagatattcatgagatggacagaggcttctctagaccttatgatctgaggattgctctagccttagtgtcgcttcggtgacttcccctgcggatttacataaatcttccacagcggcaaaggtagatgcatgagttacagctggagtgatgacatgcttaaagattgagtcagctgctttcgcaagcccatagtctaatattccaatcacctagataaatccagaacagtcaaatgccaaaaagtgtaatctaacaaatgacttaacacagaaataaaaataaaaattgatacagaagtcaaatcatatatccatacctccattgcctctagaacagtactaagagcgattccagcagtctcaccaacgcttagctgatacttaatccggattctactcgagtctagctcaaaacgcactgcattctccatgaactttgcaagcacctcttgaatctgcaaaacacatacacgattctttgaaatgtggatgcaaattcgaagattaaagacactaagctagccattggcactgagtttaactaaggttgcacctcgtcaaagcaattagaccattccttcctaagtaaagcgtaagccacaggttctccatcttcctcttcaccaattctcaatacaactttaagttctctgattctctcagcggcgaatctgaaacgtccatttttcaaagcttccttcgtttcctgcaatgcctcacaaattcccacgatcgcattcactaaatcaagagattctcttttcaatttcacttccttagtcttttccgttatctcatctaccacactgcgtatctcaacatcaatcggacggtcagaaaccaattgtaggacatcggagacgtcatcggagatcagacgagtcctcgagacggtgtcttgacaaagagaaaatagctccgagaaatcagagtgatgagcgacgagataagactgaactttggacttgatccgcagagaatgagactctaagcggtttatgaggagacggagatccggtgcagataacggagttgtgggatcgtttagatcgtgtccggcgagaaggtcccgaacattgatcgattcaaacaacgcgtctatctccggcatgacggagggacggtggtcgttgtcgtcggggctcttttccgattagagagtaattggcggtgatagatttggcggtgacgatggaccttattgaacacggacgtttttattttacttttactattgggcctatcaaataaaatgttaggctcaaggcccaagtcttcatcgggaacttgtaataatgtatgttttttgacatcgaaaacatgtcatttttttgttccttgtcactaacgtaccacttatttaaatgattttctttatttttgctatgaatattcaagtaaaatactgcaacagttacttagccttaagaccagctcaaaagaaatcactctactccattaatagtaaattccatttcttatataagcacaattgtaagagaaaagcataacaaaagaacatagtaaataaaaagaacaaaagcttttaaagtaagttggattaatctatattatcatttgtttttcagacaagagaaagagagatagagagaaagtgtctgatccatggctgcatctagagaatttattatatgttgcttcttaacacttctcctatgcaatttcttcatgagagtcgagtctggtgctgctgctgacgtcagtagaggaggatgcggcggcggcgatggcagcctcggggacgataatgagcggtgtgtggaggcggtgaaagaagacgacgacgatgatgtggatgatgtttacaaagtgatcaacaagatgaggatatatgcttgatcatgcatgcatgatgcattctttatatatagggctatttatttattacttttttttcgtttccattttcttttctcaagttttttccgattcttctgtttttctcttaatctatttgctttttcttttttccccttaatgagagagattatgatccgaagaagaacctgttgccttaaatatatggtttactaactttcttggatccgacaagaatgtacttatcctagcgttacacattttacctctattataagtacattatttatttaaaaaaaacaacaaaatatattaattattttcttatataacaatacacatgaattttctacataaatatccaaaaatataacaaatgactggtaatatacaattatcttttgctaagttagacaatactagcttaccatacacgtaccagtctcagcttgctgctacttaaaaaaacattattctcatagaattagttacaaaaattttgtattttatagttttactaatttagttgaaaaattaagttttatttatgtaattttatcttttcttcttttttcaagaaaaattatatctcatagtatcaacccccacgacatctttggctagcttcgcaacctggtttatacggattagccggttgcatcttgcaaccagctgaagatccaggagcacaacctttgggtaaatcttctcgcatagctggagcgcctatactgtttgcctccgttgtgctcatgacgatagatataataattataagagcaaatgattgtacaactgttttcttggatatacccatttttccttattgataaacttttttactttttacttcttattcccaataaacatttgcgctattatatagtgaagatttgttgctaaataaagaattttctgattggtttagtcatttgtaaccgttgaatgttttgtcgggtttgcgcattgtttggtgaaccatacttattattattatttttgtaaaaataaagatatctctaatcaaagccgtttctaatattttagaggccaaaacaactaaagaaaatattaaaatatggtcgttttttgatattcaaataaaaattcgttataagttttacttcaaattaaaacaaaaattaacatagtactgttaaataagtacattataccatatcttggttcaaaatttgtagagatattgtaaacaaaacaaataatgaagaaaaaaaaaacaaaaaagccatgaagaatgtttcataaaagtaaaatttctaaatataaagtaaacaaaagagagagagaaatgttttaagttaaatagatgttaaataaaaaatggatgtaagaaaaaaaagttattgataaaagaagaaatatatctaggcacattgcattgtgttgctcgtctctggctaggcgtacatatctcgcctttataattgtcaccccactgttgttagattctagataacgtgggaatacatgtaggtgcttaattggtcgtacatgtcaaaacgaatgtgcttggtagaaacaaaataaaagctagtgtgtttgacgggaccggaggattcgtactagatatgatcgaatatttctatttctatgtggaatttagttatcttctctagcttggattttgttagaccggccagccagttcatgtggtagcattatattagcaacactagttacgtaaagttttgtgctcagatctgggacatgcaacaaatgatattataattttgtatgcatgcaacgtagtgggagatgtatcagctgtatcaactaatgatattatacaatatgtacaatttacaaatgatattcccaaagtaacgccccatgcactaggtccttctaatagggtcacatatttatcggtctattcatttacccaaggaaagataaattgctttattatgtttaaccaaaattcagcatctaatatagcttcgaagtcatgaatttgaaaccctttttttgtcaacaatattatattaatcttcgaatgcgattacaaccgaaagaaaccgggtactcgatgccgaaaagtcccggaatgatacataaatgagatagattaaataaacggttacaaccgtagataagattaaatacaaaacatgaatttgaacttaacataggaaacgaactattttaacttgttgtagttgttaacccgaaaagagtttggatattcttacatttaaaactttttggttaccaaaaaagtatttaatacaaagtaatttttatgttgaatgatgtgcaaatgaatatatcctcaaggttatcaatttggaccatacggattcctgtcaagaccaaacatgtgtaggggtgaataaattagccgaaaaaccggctctacattaaattaaacttgttttttctttttttctttctaagagcaactaagatatatataaccggttcaatttataccctaattgaaacccctttgtcaaggaacctgtctatatatacagacatatgcttactactttcttctcactccaatacaactaaaaaaatctactacggtgtattatacgacgaccatcatgctcaaaatgggtctaacgtcatttgaaggttcgttttacttctttcttcatgcgtacatataagtttaaattcatttatgtctatttatgtttactcatatgtaatgtaatatagacgccataaaagagcagctaaaggaacgaaaaaacgctcacttcatgttggttgatggaatgtcgaagctactgactgaaaaagttaacaattttcagtcattggatttccaagtatctggtctcaaatggtgagtcatttgatgatctggtgccccaacacggctctgcaatttaattaaacttaagtgtgttctttgtggcttgaaattggcgatataggaggttgcttatacaaccagctgtgggagtaaaagattatctatctgttgctgtatggatcatagatgaaaagtgtaccgggcctaattgggaagtcaaattcaacttcaaaatcggcctactccctcagactggacctgaatatttctacggtatgtttttgtgtgtgtacatatataaatatatatacccaaatatttcacaagtattattttgataatttgaaatatatgttttgtatcagtctcggtggggtgtcacaacgaaaaacaacctgctcaaggggtagtcaaattcataacacacacgcagttaaaggagaggtttcttgtgaacgacaaagcggttttctatgccgagataagcgaagaagtcataccaaacttcctcgttactggtatccctcgaaccatggggacagcagaacgctttaaactgatagaggtggctcggaacaattccagattcacctggaagatcacgaagttttcctccttcaatggtgaagagcattcgtcttacgagttcacggttggaccacggagatggtatgcaaatcttatatatactctctcatcttgtgacttgttttgattgaatgttcatgaattttttataaaaattatctaaatagactcacttattcaaaatattagaataaaattaataatgtgttacattaaaaaaaatatacaaaacaatggtaaaaatatgtttatcttatacattgcgcacatgtttcccatatatatgaaccaggaaactagtaatgtacccaagaggaaccggagatgggaaaggaaactcgttgtctttgtatttgaatgcgtctaattacgtcaccaataatggtccaaaggggagaacattcgcggtctataaattgagagtgttggaccaactccatcgcaatcatttcgaaattggtatgtatgtatacgtaattatccttttgttttctaagctttacattttctatatgcatatatcatctatataataagccgtttgctactactaatgatcacatgtttgataaagactgccaagattggtttctttatgatccggttcatccaagattatgctcatggggacgtaccaagttcttgccgctggaggaactccacaaagcttctaggggatttctggtgaatgatcagatatatatcggtgttgaattcttaattgtatccactactgagtatctctgatgcgcattcacgggtttgatcaagaccacaccaataaatagctcccgttgaacctatctacctattgttctatacttgaatattgtcatgtacgttgctaaattatcttattgagggatgcatgcttcatgcttgtgtttgtgtttaagtgctatttcttgtttgtaatatatacataaacaattaaaaacctcaccacgttgaaaaaatcaatttccataacaatatttatacatatttcttaacatttatggatactatggccaaattataggtggctttgaaatttaaatgcctatctctctacaaaatattactagaaactttagaccatccttattggtcatattcttattcgtgtcttaaaaaaaacaaagacaccatcattttgggatctaaaactgtcttcctagtaacactaatctcactaattcacacatttaaagacacccccatttcctttctttttttaatatttagagacaccctcatgggatgaccaatgagggcggtagttgaaaatttatcattaattcgtaaaattatgattgttttaatgcataaaggttcaatttatcttttaaagccatagaattctatatagttcagaagtaaatcagtgttaagtttttttatatttcgactcttagaaaaatataacttataaatgagattcttgtttataactgctaaacttcaaaagtaatgatataaaacatatgtttgcatcattttataaaaattctttcttatactttttcattaattatatacatatatgagtcacacatttctaaggtcgactgtctttggcatgtagtcctaaagttcacattagtagtttcattttaattataggttttgtaatttcggtttagatttccaaaccttttaatgaaaactctttctgttctattttactataagatttttaggtaaaagcacggtctttaaaaactggtaaaatatttgatcatttctacaattccacctaacattttggttcaaatttcttagagatagacaaaacaaattatcattaaaatgaaaaaaaaaaacaaatatgaagaattttacataaaagagtcttagttctaaatataaagtaaaaaatatagagagatttttaagttaaacagaagttaaatataaaaaaatggatgtaagaaaaaaacagaagacaagttattgatagagaagaaatatatctaggcacattgcgttgcattactaggaaagaggatattgcgttgctcgtctctagacacatatctcgccttcacaattgcactcactgttgttagattctcgataacgtgggaataaatgtaggtgcttaattggtcatacatatgtcaaaacaaatgtgcttggtggaaacaaaataaaaattagtgtgtttgaggggaccggaggatatggttcgtattagatatgatcgaatctgtctaattctatgcgggaattcagttatgctctctagggtgagattttctagactggccagaaaattaatgtggtagcaactaattattttgcaaagttggacatgatcaatgcaacgtggttggagatgtatcataattgtatcaacacttgtacgtagcatatgtacaaatgatactcccaaagtaacgtcccaggcactatagctcctctgaataggctcatatttatccgtcgattcattagcccaagaaaaaaatattgtttttgtcaggtttaatacacaaaaattcagcattagttttcaattggggtgtgtatgaagagatctaagatctttaaagtcatgaatataatcatgaactaatttaacttggtgaagttttcaagccgaaaatagtatggatcaaacacctaaaactttttcataaataaaaaagagtatttaatacaaagtaattatatatattcttcacattaaaatcaaaaaataaataattatatatgtatgttgaatgtaaaagaaataaaatgtcatgtcgtcgaatgatgtcgtgtaaatatatatacctactgcatatatacttaacggttaattatcaattggaccatatatacatattcttgtcgagtccaaacaggtctagggatatttcaaccttacatcttagcctaaacccgatcctaaacagcttggagatcgatatcaatcgaaccaaagatttaaaccatgaacaacagttttcgaaataaaattcatgaacagtcgaaagaaaatttatctgatgaccggcacaagaaatctgataggaccctaatcgtgtttaaccggaaaaccccgctctatttttatttttttgagcaagtaagatatataaccggttctatttatatcctaattgaaaccccttcgtcaaggaatctgcctatatatagtaacatatgcataccaatttcttctcaccccaatacaaactatagaccaaagaaaagaaaaaaaaaccctcctacggtatatttgacgaccattatcctcataatgggtctactgtcacttgaaggttcgtttaatttcacttaattctgcatgcatgcatacaagtttaaattcatttatgctatttatatttactcatcgacatatatacttcaagccagacaccataaaagagaagctaaaggaccgcaaaaacgctcacttcatgttggttgacggaatgtctaagctactgacggaaaaagttaagaattgtcagtcattggatttccaagtttctggtgtcaaatggtgagtcgtcgatctgttgaccaaccacggttcagcaattttattttaacttatttgtgttcttttaaattggcttgaaatttggcgttataggaggttggttatacgcttatctaggggaagaaaagaccatctatcttttgttctggagatcacagatgaaaagtgtaccgggtctacttgggacgtcaaattcaacttcaaaatcggcatagtccctcagactggaccagattattgcttcggtatgtttctgtatgtatataaacataaaaaaaaataaaaaaaattcatacatgtattattgggtgtagattttgataatattgaaatatatatgttgtgttatcagttttggtggggcatcaaaacgaaaaaaaacgtagtcaagggttagccaacttcatatcacacacggatttgaaggagaggtttcttgtgaacgacaaagcggggttctatgccgagataagcgatgtccaaccaaacttccccgttacccgtatccctcgaacaatggggacagcagaacgctttaaactgatagagttttctccgaaaaactccagattcacctggaagatcacgcagttttcctccttcgatggtgaagagcattcttcttacgagttcacggttggaccacggagatggtacgcaaatcttatactctcatgcatctgttaaagtaaaaaaagtaatgcatgtttcaatataaatttaacgttttacattgaatatttacaaaaacaaaaaacatgttcttttataaaatatgcatgtttccaatatgaaccaggaaactagtaatgtacccaaaaggaaacggagatggaaaaggaaattcgttgtctttgtatttgtttgcatccgattacgtcaccaatggtcctaagggtggaacattggccatctataaattgagagtgttggaccaactcaatcgcaatcactgtgaaactggtatgtgtatatatacacttaattcactaatttatacttttttctaagctttacattttctatatgcatatacatataagccttttgctgataaatagttacatgtttgataaagagtgtagatattggtttccttataaccctgttaatcaaatggattccttatggggacgtcccaagtttttgccgctggaggaactccacaaatcttcgaggggatttctagtgaacgatcagatatatatcggtgttgagatctcaattgtatccactactgagtatctctgatgcgcattaatggattcgatcaagaccagaagaatgaatagctcatgttgaacctatctaccagttatatattctgccatattgtgatgtgtgtttagatatcagtgaatgatacaaacatgcatgtttatacaaaataataaaataagcgacggatcgaatcggttgattgtattgaatgttacaataacgttcaaccgaatccgttgctgcaaattctcttatggagaagaatgcatgcttgtctataagtactacctttcttgtttgtaataacaacgatatatctatgtgtgtgttaaatattttattccgactcttaaaaaatataacatatgaaagagattataaaacatatatatatgtttgcatctttataaacattatttctcatagtttttatttatttaagatatatatcattcacacatttctaaggccgactctttggcatgttgtccacatttgtagtttcatttttgtaggttttgtaatttcggtttatattttcaaaccttacatttaatacaagtttagaggttgaccaagaaaactatgattcacatatgcattgcatatttattattaactgttaagcatatctctttttttatagtccgctatatattgctgttagattctcgataatatgggaattaaatttttgtgatttagagtggtttttgaagatatatgtcgaggcattaggcatatggttcctgatataactcgcacctacctatcttatgtaggaatctatccccttaagttacgtcgatcggactactagaagataagtattttgcatcaatgctttaacatagcttaaaagctgaccccaaaaaaaaaaacagcgtctcatatcactttgaataaaagttgatataagataaatgacgctaaccgtagaaaatatgacattacttattgtacgaccgtcatgcgttcaaataagtgatagttattattgttgttttacatcacttatttggtaaccaacgcataaacaaaaatagactatagattttatatagacgacacatttctcctcattattctaagacatcgtcgacaaatttaaagctttaattgtttactttaattatatgtatatatataggagaaaagaacaaacaaaagaggatgtgtgaggctttacatagtttaaaaacaaacattcgatcgtagttttattcattattagtatgtgcatacaaacactcacaaaacacagaaacatatatatattttaaaacatagatatgaccatctcagcttttattcttcttattataaacgatatggttagctgaggattgactctactataaaagagtagattagtgatcatatcatactttcaccatttcttcacataaaatcgctcctgtaacttagctgcgagttctcaggttccagatactcaacgtcgaacaacttgggtgcatatcctttctcacgatggccctcgaaatagcatttatggagagtctctttggaatcaagaaactcacttagccattttccagatgaccttatataacgtttcatgttgtcattataatcgacgtaatagagcccgaacctgactttataacctttatcccactcgaagttgtccattaacgaccatatgtagtaacccttcagcctcactttgtccatcctgcaaagtgcaaaccatccattacataactacatgatacgacttatcattctgacaaagtcgcttagaaatgtgagatgataatggcctaagatatttgtatgttatttgctatatataagtatttttagtagaaatatatagttaagtatattatacctgatggatttacccatgattaagatgtgactcttgatgaactctttcctcccgtaatcgttagtagcttccgttatgtttttggtcccatagtcgatctcgtccatccctacaatttatagaaattagtataacttaccaaaaacattctaatcatcatactaattactcattcacacacatatgtatatgatatagttcattcattaccattctccataatgtaaatctctgggtccatgtattcgtctttgatatgtttcaagatattcttcaaacccgctggatatatcactatacccattgaagttgtctgcaaatcaggaagacttaggttattagtaataacttgaattagcaggaaaaaaaggatactcatttgaatttagttgacaaagttgacgatttttgtttgttaatagatatagaaatgtttttaaaataaaatctccgttttctaattttgcagcttaacatttttttaaagagtattaaaatatatgtcaagtgttttaggaggattgttaaagagtaccttgagatgtggtgaattgttttgactatctgcaaagaaccaaaaagaagtaaagcaaaccattacttttcatagaaattaatgttaaaatgatattgtttcattttgaaagaaatttcttgaaaacggtcaaggttatagtacctgtccagtttacacgtaagtcggtctcataattaagctgcgatgaattgactttggcgagaggggtagagaagaatgctccatagtaatttaatccgacgaaatccaaagattttcttagtttctcagattcttctggtgtaaattcacgcagtcggatgtttacatcttctaacatttccgctggatactgtccatatgtgagagggcgaagaaacctgcccatttgtagttcagaaagcaagaatgtcacatcttatgtatgatcaatttaaacattattttaattaatcatggatacatactaagatcgatcccaaaggaaaaatagttaaaagaaggaagaaaaaatcaccagccgagttggtactcgagggatcgtctagctgctttgacgtcttcactcgaatttggatctttaggctcgaaccagtgagataccaacactatcccaattttccctccaccctcttggcactatattgtaacatagtaaagaaattattaaatgaataatgtatgtatggcatactatttttgtaattcagatatgtataggatttatgatttaagctttataatatatgtggaaattagttagtatataagcaccgacctttttacagtttcggaattcatcaacagcagcaagatgagcaagaatttggttgtgagcaactatgtatggctcctcggatgaatctcctgtgggacattttggggcttgccatttagagcaccgtcctggtgctttcttacctttcgagtaaccagcaacgctgtataccgatggctcgttaaacgtcgcccaattcttcaccctatctccaaattccttgaagcaaaagtttgcaaactcacggaaatcctctctacattaatttgttagcgacaaaaaaattatttaagaaaatcagatagttgaatagttttcttaattatactagaagaagaaatcttgagaagtttttatcaacaaaattacttacactatcctttcgtttaggaaacctccgtactccatttctagagcaagtggagattcccagtgaaagagagtaaccgaaggctgaattcctggcaattagtattacaaacgattaaaaacaaaagctggtataatatacacaagttggaaataacaattaagattgaataatataagagacattaagttataagatgtttaaccattagctaaaagttcatttataagatcgttgtagaacttcaccccctcctcgtttacaccttttttaatagttccatctgcaaattatatataaattttcatgagttataaaagtaaaaagaatcattacgtcattgcaatatagatttaagttagagataatatgtgtggtctggtaaattaactgtaaggacaatgagattgacttacaaggcaagatcctggtccatgagattgaaaatctgaagccattcgtgttcaactccttcattaattttatatcatcctataacgtcacatcccgcccaatcgtttcaatttaattataggataaaaaaaagactatcatttactatatatgaaatcatatacacccataataaataatgacgtaccttgtaacgggtatagaagtcgactccctcatctccatcgccattttgttgaaccttctctgaaagatgccacaatattggtgatacattttcttttaagaaaagcttttggtaaaataaaatacaattcataatcacttggtaatttataccaggaaacatgtgtgtaaattcgtcccatgaggtcaagcctctcccagaaccctttttagcaccttcaacctaaaagtcaaaccaatttgaaaatgataagactgatcttctatatatcatcaatgttataatgtgtttatatgtatgttgacctgatatgcggaaacagatgttccaaatatgaaatctgcggggaaatcttgcttgtggatctcaaactcgggtccaatgatggtgcccaaatcatcatcatttaggttggtctgcggtccaacggtggtgcccatgtccatgtcaatgtcttcgtcatctacggtcgcatgtggtccaatcacgatgcctatctcgtcatcgaagctagtttgatgaggtccaatgatggtaccaagatcctcatcacttggttgaggcctagcatcggcgttgaagctaagtatggtactagttaaggctaagagccctaggaaaagagtgagagtagctgtagccatatgagtgttttttcttgtgaattttattagttttttttttttttatgcttcttccatttccaatccattctatttataggaaagaagcttcaagtgtgtgttatgtgaaagggaatttgtgatttccttgtgttgcactcatattttgcggggcatctttagtttagttataggattagttaaaaaaagtttataatattatgaacatttacttcctttatatttctgaattcgtcaagcgtcattgtccataacaaagcacgaagtgcattttaatgactttaataaaaaaaaaagtattctaataccttgctcaaaactttaaatattataatattccaatcgtctttactagcatatatccatcattttcatatatttcctttactcacctcattttctacttattaacacaacaataagagacaaagcggcattcctggtgaatatccacgatactacattcatttaaaacaatttcgtcaaagtttacatcaacttcacattaatcccaaaatagtccaaagacccaacaaaaaataaaaactgagttctaagaagacatgggcttgttaatatcattttcatgggaatagatagcgccagtttagtttttttagaagctgttttcatataaaattcagagaagaattgttgaacatagtcaatcttaatgctgaatgcaaatccttgatgcacaacatttctcttaagataggttctttaaggaatgacattctgaaatccaatccaataacattacccctatgtccgcttgtgtccagcatccgtacgtcggtttctacagcagtggttggctggcttatgtctagggtttcaccgttcgtctcctgtatcttgtctagggtttattttgttttggttttggtgaagtggtgttgtagatctgtgaaagtttcgacaccggtccctttggtgatgatcaataatgtgctcaagccatcgataatctaaagttacaataagttcaagctttttttttggaagaaaaaccttgtgttatagctttgagtaaaccggtaaatgtccctcaagtctccttccgagaaccgaattctctaatcatttttcagtgctttttattaagttcaagaacccacatgtcgcgatttgattgtagccaattctgataagaacatgcattctagaattagagcaaatcaacaagtgtaaaattgtaaaatcatctctatatttgcaacagaaattacctaaatgtatctcataacgtttaaaatacaaactttatgataaaatgtacaaatgcgtcaacaaatgtgaaataatcaaataaaaataggtattgggagggtcacggtccacgttcaggttcacgtcttaattttacggcttattatacaaaaccataaccaaaatgttcttatctcactttcctttctattcccggatttgccgctttcttcttcttcatcatctctctctcaaaatcaccccttttaaagttgtttcctttatacgcaaaagtgaacgcagatcttaatgcagctactgtgatttcgattcttagggtaaatatattcttttactcattggattggcactcctcagcatctgggtttttgcaaaggtataatttttattgtctctttcgattggatttgattgatctgccgattctctgtttctcccgagctttgtgggttaagatctcgattatctatctgggaatctttagattttgtgttcatcggagctgttaatcgttggactcgctagtgttcttctcttgtaaaaactttgtggaggagaatctgattgtaggtatagtgtgaagtgagtttgagctgaattctgtagctttacatggaagtttttggttgatgataacgtcttgtactttgataccatatctgaccatagtcgccagattcttaatcggatctagttcgagttataagactcttcaatagtctctccttaggttcttatgtttttattgtgtgttgatctggtttctctgatcaaggattcagcttttagctccctttattggtcatataagaatagatctgtttgattggtttcttaactgagcaattgtgtagcagattaggtgcttatcattatctttgtttttgttctgtgtatttgaatatctcattaggatcttggcatctcctattgatcatgatatcttgttctccgaagtttgtttggttttgtaacagattttatgtttatgcagcattcttattacttccactgattcaaacatgtggaagtttaaaccttttgctcaaaaagaacctgcgggtctcgaaggtcgatttctcgagataggaaatctgaaagttcaagttagaaatgtcattgcggaaggaggtttctccagtgtttacttagctcaagatgtaaatcacgcgtcaaagcaatatgctttgaagcacatgatatgcaatgacgaggagtcacttgaactcgtaatgaaagagatctcggttctgaaatccctcaagggacatccaaatgttgtcacgctctacgcacatggtatcttggatatggggaggaataaaaaagaagctcttttggctatggatttttgtggtaaatctcttgtggatgtgcttgagaatagaggtgctggttactttgaagagaaacaagctcttacgatttttagagatgtgtgtaatgctgtctttgcaatgcattgtcaatccccacgcattgctcacaggtatacatgttgtattattagatttcgtttcgtttttacattagcaagcgatgtgaattgatactgtattggtgttgctaatcgtgacagagacttgaaggctgagaatcttctattgagctcagatggacaatggaaattgtgtgattttggaagcgtttcgacaaatcacaagatttttgaaagagcagaagagatgggaattgaagaagataatattagaaaatacacaacaccaacatatagagctcctgaggtttgactggatatgcacctatgcagattataagagttttaaaagtggtgaaaaaatgtttgatttatgtctttattggcaatagatgtgggatctctttcgaagggagatgataagcgagaaggtcgatatatgggtatgtgatgacactttttcaatctctccagattgctaatctatttggttgaaacttgaaagtaaaggtttgtttttaaaaaaaaataggctcttggatgtctcttgtttcggatatgctatttcaagaatgcatttgatggagaatcaaagctgcaaatcttaaacgggaattatcgtattccagaatcgcctaaatacagtgtatttattacggatctcatcaaagaaatgctccaagcttcacccgatgaacgaccagatattacacaggttaaaagtcaatttttactcattgtttcttctcagttgaggaaatgtaaaatgtctctaacaacatgtccatctacagatttggtttcgtgtcaatgagcagcttcctgctaatttacagaaatcattaccggatcgaccacctgaaatgcaatctactggagtccatgatggtatagtgaataaaacctattttggatagcttctcaaagaaagatgtgatttcttttgatccttatgaattttgacaggctcatcaaaatcagcaactaaaccttctccagcacctcgtagaagtccgccaccgccgccaccatcttctggagaatcagatagtggaggaccgctcggtgccttttgggcgactcagcatgctaaaacctcagttgtatcagaagataacaaaaacatgcctaaatttgatgaaccaaacagtaacacatctaaatctgaaagagttcgtgtggatagtcatcaacccaaaaaaccaagtcctgtgagaggagaggctcgtggtattcaaagaaataaagatcttgaaactacgatttctcagaagaatacaactcctgctgcagccaataacatgacaagagtgtccaaggatgatgccttcaactcgtttgttgctgactttgataccacaaagttcgataatggtaataaacctggcaaagaagaggcattggaagctgagatacagaggttaaaagacgagttgaagcaaacaaaatcagagaaggcagaaataactgctaagtttgaaaagctttctgctatctgcagatcgcaaaggcaagagttgcaggatctcaaacaaacacttgcctctaaaagtgcctcaccgtcaccgagcagagactcttcacaaaatcaaccctctccagggatgcattccatgtcatcaactccatcggtattattcttggttcttgttcatctaagcttagacacccatacaaaagtcttcatcaatgtatatcttagaattctaatgttcttgatgaaacagagagataagatggaaggaacaatgtgggaacttcaacaggacagatctaactggtcaactggcagctctgatacaaattcatggcaaccttttagtgatgaagcgaaacccgtgatggaatctgcatcaaagggtaacaataatacgattaatcagtctgtgagaaccagaagtaaaccagcttctgctgcaggtactcaaggttttgagccatggggtttcgagacagaatcctttagagccgctgcaacgtctgcagctgctacttctgcatctggaacacaaagatctatgggctctggaaacagcacttcacagagatatgggaactcaaagatgagagaaaaccagaaaacagctcaacctgctggatgggccggcttctaaaactcactcagatgcgcattgctatttcttcctcatgcaacaacaacagcttcatgttgctgccattacagaatcttgaatctttttgtagatgatgatcatcccctgtttttgtgctgctgctaaatataccccacccatatccattatgttttatgtagagtcttaaactttacacattctctgagctgtggccagatatctcagcttatggattattattggaaaaataaataattcaagattcagacagcttacacttctttctgtgaaacttagaactaaggtcacatttaataccgaacccaaccatacgatggctgcattatggtttaaatgttacccaaaaagatttcagccgtaactaaatcagcattttaaaatcctggattaattttcgttaatgtaaatctcacattgaaccggacccgagtagaaaaaagtaaaaaaccgaaccaaaacattaaataccgagccctagtttagttagttagaaggaacttaaaaagagttcgtgtcctgaaaatcaaagaaaaagctaccaaattttgaatcgttgtctttaacttgattttccccaaatttctcagaaatcaaaatccgccggaacaatgtctactcccgatcccaatcccaatccaaatccaaatccttccgtctctgtagcagtatcgactccaatcgtcaccgcatctgaatctccggtgacacaacctaacacagtcataacgccgtcgtctcaacctcaacctcaaacaccagcttcgtcgtacagagccatagctccgcttcatcgtcatcatcctcatcaaaatatctacactaaccctttaccgattaggcgttcgaattccgttactaattcgcctcatcagcctcctcacccagacccgtctagtctgatatacccgtttggttcttcgggtcgagggtttccgacccgacccgttagacagaattccaattccgtcgctgatccagttggtagtcctagtccaggtgggtatactcctcgagggccagtttacggataccaccatggccaattcgtgtcgaatttggatccaatgaatcagttcatgagagctgcacatcctcagaatcaacaatctcctcaacttggttccggtcatatgaaaggagttcctcattttttgcaacctcgggttagttatcgttttcgttaccaaaacaagtttgaatctttttgtttaattccatagttttgtcaagtgttttttttgtagcttgtgctagttagtgaaaatgtgtatgttgaagtgaagattatttgctttggtgattgtagaattcgaatagcaatctctaatgaattaggaaaggttgaaacttctgttagatatttgtgtgaggttacattttgtaaattttggatttttgattgttaggctactccttctccaacttcaattctagacaacagtgggcataagaaggccaggtactttatcttctttgccattatgctttgttaattagaaactactctagaaacttaataatgtctctgtttcgtttccatggtgtttaggagccgggatgatgctctggtcctcgttagaaaaagaaaggtatagttttatccttgttttttggttttgcattatcgttcgaaaccgcttgcttcgccatttgaggaattttaaatactttttatttgttctgcaggttagaataaccgagggagcttctttatactcgctgtgtcgatcttggttgagaaatggtgctcatgagggaattaaggttcgtatccatttcttatttctgctttgtagtataatgcaacacttggatttttgtatatctattcttgatatctttggaagattaatgacgttgtttacagccgcagcgaattgatatgatgacatgtttgccaaagcctttacctgtggacaagacggagacaagtttgccaaaagatttagttgaagaagcaatttgcgaagaagacaaagaggtttcgtgtttctctgatttctttctaaaatggtaattgtgaagggtaaagctaagtttgattatttacttcaactctcttgatgagcttcaggacgaggaatctgtgaaacatttgtcagaatctgatcttttgaaaagacatatagaccgagctaagaaggtccgcgctcggtgagtcccacaacatatcatcaaagctaagttcgatggttgaagattgaatattttttgttttgaacaaaattgtgtggtttgttttgtttgcagattgagagaagaacggttaaagagaatcgcgaggtacaaggcaagattggctcttcttctgccaccctttggagagcaatgcaggaacgagtaatgattttaaagttagggacttcggtgtgaatatacttgcagttgatttagaaatgacataaattatcttagagccagagttatgtcttatgtctgtgtgtaatataagaaagattttctctgaattttcgtcatacactcgtattagatgattctaaactaatcaacaatctcaagattttctgagatggttaacttatatagctcttatcttttttttttttcaagaacacctagtagttcttggacaagtaaaattttcaatatagtattcggtcatggtgggtcgaccatgttttgaacgctggatcgatcatcatgtggtcggacgatcataatttcagagattgatcgaccatccttggaagcacgaacacatttagtcatgtgtttgaattttcttttatcttatttgtttccaactcccaaatgatacgaaatgtcacaaaaactcttaaaatcactacataatctaagacttcctaagacacaaatactcctatggacattaaaacaagattttatcaacagtgaagccatattatcatcactgtagttctgaaaatgccatattgcccaaagtcttttctagctagtatgccatagtggctaacatcttcttctttcttttcatctctctaaataagcaaaaaattgagaggctttctcttcctcttctattcctctccaacatagtattcattctctcctcatctcatctcttgtttcttttcagccggagcttgtgccgatggttctacgtcgatctcactctctcaacgacgaagaaaacatcccccaaagcctccttctatgtccaaatgtaaagcttctccgcagcacacaaccttccaccgctgtaccaccaccgttcctacttttctgacatggaactgaagctttatcaagttttatgttaagtaatgttaatcggaagtcctttaggcaagatgtctagctaaatgttatagaaattctagggtgacaatttttgttttcaggcagacaatggtaactagtaactggacaaattaatttgaagtatacaaattattatggacaatatttttctaatatttgtagacaatttttattacatataagatcaattactcaaattttgttttaaaatatattttttcgaacgaaatatgattttaggatgaaacaagaggccatatagtacgacgaacatgacccatccacaagcttaatttgttcttgttttccaactcactcttttctaatttgaagattaatgcttactgacctttaagattaagatgttgtagttttgtttttcaagttttcaccgtttaaaatacacaaataccaaaagtctttagttacactttgttatgtaacaaaaaacattgctggcatagtggcatattgacaaaccttccaaaatttgatttatctgtttgaaatatcacagttaaaaaaacaaacccaaaaaaaagagatgtttatgacaaatgaactccatgaatatgtattattccctggcatatgtaacaacataactttattaaccaactcttgtctcattataaatttctgaaacaatgtatacaataattactcactaattcttgtagcaaattaaacccaaaaatagttaagaagaaaattaacaaaaaaaaatatggttgcatacgagaagagtcctattgtttttctatttgctacaatgatgcttgtaatgtttttgttttgtggaagtggagaagcaagaacattagggtacggatctattaaaggagaccgaattccggcatgtggctataaaaaccccaattcatgtgtcaaacaaccagttaaccattaccatagaggttgtgaaaaaattaccaggtgtgctcgtgatgctgctcgttatactgaatccttcaatgtcgatgacgatgaaagtcccattattaatctccattgaaatttaatctttaatttactttcgttgatactacaaagattcatgtatttatacgtcgtgtagcttgaatatattcatatacctaattatcagtctattaaaatgtgaaagattatattttattaatttgtgtttttatgtaaagtcactaattgttgtcttaaatttttatgtattctatgcttttcctgagattatttatttatttgtttataatttttttttaattaaaaaataaattatgtgtgactactctttctctagatatgccttaagcaataaaagggggaaaaacattttttgatgacaaattagtttgtcatatgaatgaaattgtggtttagatgaatttcatccaagaattcttaatagaaccgaaaatctctttaagttttaacataatcaacaaagataaattctatgaacattcctaatatttcctttaagattactcaatgaattcttgtccgagcgcttgcatttgtctaatcatcaacatagacgaatcatacatttgcttgcggctaacgtcaccttcctttcctccttcctcttcgaagagcctaccatccaatatactcagcacatagacaaaaatctatatgagttacaaaaattcatccattgagttgttacaatttaatttgattgaaaattgttcattagacattaggtgaggaatgcaatgttgtgtgagttaaatttaagttactactgctactattgattcaagtccgtcatacaaaattctagagaaaattaatatatatatcctctcgttttcccatatcttaaaattgttaaattgaaatccagagggtaagtgagagaagcaatcgacctcagcaagaggtgtagtattcataaaagttttacgttgtatatttaatgacactacaaagtcattggaaaatatatttttgtaaggtatattcttatagattcttttaaatgtacttttcgtttctagagttctctgaagactttagttccacttcagcgtttcaacagttcaaagtttccacctcatgcatgtgttatgtgtacatatttcttctatacatccttttttttcagtgaactatatgttataaaacagtaactcttatagttaagtgtaaactggttggtttaagaataaactaaatattttttattaaattgtagtaaattgattagtttaagatagaaaccaaaaccaagcttaataaagttagattgattcctaacgttagaaaaaaaaagttagattgattcctcacgtttcaaaaggggatcgttggttcttggcctcacacatacttttccttgactctttcaaaaaagacaacctttgacaaatcgcttataaactgcatttaattttacatagataactgcactcactgtcacatgcatgttcacaatatcttgactatataataattacatttataaaatactagcctatgtgatcaaaaattgttgtatcaagattttctctcaggtgactgaacaacagagaaaaacatggcgaaaaaaggaaaagaagtgttgaacgctttggacgcagccaaaacgcagatgtaccatttcacagcgattgtaatcgcgggtatgggttttttcactgatgcttacgatctatttagcatctccctcgtcacgaagctcctaggccgcatatactaccacgttgatagctccaagaagcctggaacgctccctcctaatgttgctgccgctgttaatggtgtggccttctgcggtaccttagcaggccagctcttcttcggttggctcggtgacaagctcggccgcaagaaagtttacggtaacctttgctaatttcttggccttaacatatgttttagtagttttacgtttaaaatgatctatctagattaattcaaagtatttgatccattggtaatactagaactattaattatagtatttagtggctaaattaactaatggtatataatgaaaattattggaatacacataggtattaccttgatgctcatggtactatgttctctcgggtctggtctatcatttggtcactcagctaacggagtaatggccacactttgtttcttccggttctggctcggtttcggcataggcggcgactaccctctctcagccaccatcatgtcggaatacgccaacaagaaaacacgtggcgccttcatagcagccgtcttcgctatgcaaggcttcggaatcttagccggaggaatcgtgtctctcatcgtctcgagtacatttgaccatgccttcaaagcgcccacctacgaggttgatcctgttggctccactgttcctcaagcggattacgtgtggcggattgtgctcatgtttggagctatcccagctttacttacttattattggcggatgaaaatgccggaaactgctcggtataccgctcttgtagctcggaataccaaacaagccgcctccgatatgtctaaggtacacgttccttaactaatacttaatttcatcatatactaaatcatcatactaaaccatgatgattagtgtaaaagtaattattatttacacaacaggtgcttcaagtggatctaattgcagaagaagaagcacaatcaaattcaaattcatcaaaccctaatttcaccttcggtttattcaccagagaattcgctcgccgtcacggtctccaccttctcggcacaaccaccacatggttcctcctagacatcgcctattacagcagcaacctcttccaaaaagacatctacacagcaatcggatggattcccgccgccgaaacaatgaacgcaatccacgaagtcttcaccgtctcaaaagctcaaaccctaatcgctctctgcggcaccgtccctggttactggttcaccgtcgcattcatcgatatactcggtcgattcttcatccagttgatgggatttatcttcatgacgatctttatgttcgctttagcgattccttatgatcattggagacatagagagaatcgaattggttttttgattatgtattcgttgactatgttcttcgctaattttggacctaatgcgacgacgtttgttgttcctgctgagatatttccggcgaggttgagatcgacttgtcatgggatatcggcggcgagtggtaaggcgggagcgattgttggagcgtttgggtttctttacgcggcgcagagttcggattcggagaagactgatgctggttatcctcctgggattggtgttaggaattcgttgttgatgcttgcttgtgttaatttcttggggattgtttttactctgttggttccggagtctaaagggaagtctttggaagagatttcgagagaagatgaggaacaaagcggcggagatacggtggtggagatgactgtggcaaattccggtagaaaagtcccggtttgattattttgtgttactcattttgtaaatttactctatatatgaaagtcccttgcataaagtttttcgatactcaatatatcagaataacagttttgctggaactttgcaaccaaattactctgtgaattggaaagtattatcttacttcttcctataaagcaccagtgatctttttgtaaagagattcataagtctattggtttatggaacaatgccttcacatgcaagtcatattatttgtccagacgacgaagaggaagaatttgttgaactagaaagcagtggcgatagaatcgttcattaagataaatggttcgtataaaaccattaggataaattctatgttttgtgtttcatcattgaatatctaccagaccaaatgattttatttggttttagtttcttttgtaaatcccaaaaaaggtaaagttatatcaaaaccaaactacaaaccagatgttaatccctattgtattaaccacaaacatgttaccagaatatatcaaaagtgtatcagtttcagtttgctactaagtaaagactttcatctttgtgttgcttaggcttcaagttcgttttatcttgtcttctctgttttactctgctttatgatgatgataaataacgatggaacacaagagagaagagctccattatgcacaagaattcatttccataatatagttgcttgtcatgtcgttcaaatcaaactccattttcatgaatttgcataaacaaaagaaaaacacacattccacttgaaacaacacaccgagagattatgaaaatccttatataatatattcacaactcattaactcataacattgtttgcttctaagtaatggaatttaagtggcatgctactctactctagtttactaaacgaatagaaaaccaaaactttcaagtcacgatcctactaatttccatcccttgtcttccgcagattctctgatgacactactcattgttgttgatttctaatggtctgcctccaatggtggagaagtgctaatgcagcattgcatatctttctatctttgtgctttgtgagacgctcaagctt

SEQ ID NO: 323 - DNA, 93158 bp, Arabidopsis thaliana
gaattccgtggtttgacatttatggctatcctgaacagatactgtgttgagtaggacactaatttggtcactgaaactacaagatgaggaacttggaaaaactacgggttcaggtcgaagttcgtctccaataggttctggattttggacaaggaatcaaccttaaaatcaggttgcagaccggaaacagaaaaatcgtctggtccataccttccggtttcatctagcaagcaagtgaaggctccagctcgtttcccacatgctatctgcagaatcgagaaaagaaagatcgattaccagttgtaatcttcagtaaagatgtgagaaaaatagtctgaaaagttggtaggcatcctttccacatagaaaatctttaagcaatggcatgagaagatccattgtttaagcttctttcattgcattgcttatcgatttgctatggagaaagggttgaccaaaggcttgtcatcatgtctgtcactcacatcatcttttaagctgtcaccaaccatcatgacttcattaggttggatgtcccatgtagaacatatatgcaacagcgggtctgggtttggtttatatggacgaaactctctgcctagtgctggagaaaagataacctatacaatgaaaaataactgtaaggaactgcctcagatttcttctctctgataaaaaaaaaagaatgatccagctaaacctatctcaggcagctgtcaaaatgtcttcaattcaacattcttacctcaaaacgttgatggaagatgtcgattgccttttgaacattgcgtgtaattagccccctcctataaagtaaaatacaaaatgtaacaacagtcaagttatctgaacaagaaaacaaaaaatcatagacagaagtatctgaaaaccacagactttatctttttggaatcaaggaagccacatagttcagcagtacctgccacataaatgatcacatatcagaagagaattaaacctctaaacgccaaagaaacacagtactccttctagattttcaactgctaaatcatcttatagaactcaacagcataaagtcaatgaccagtaaaggaatgatctcaaatcgtgatgtggggctctaagacaaaagtcaaacctccgttagaccataaagtcttcacttttaacaaatgttcattttatctttcagccttgaatttgcaatcttttctcatctttaactctacgaaattctcaatctttaacccattttacgatagattatcagacgaaaacccaaatccttaacacttcctcagcgcaaacacaaaatcaaaaataaaaaaataaagcagatgaatccgtaccaggcatgatttgaagcttatctattccttgtttctcataatcagcaatgatttcatacgccttctgctgtttatcaggactccacgactcaatatgatgcagaatatcaatcccactagggctctctgctttgattcgcttgtaagcatcttcaccaagaacagctctatacattgcggcgaaatcgatgaccggaacagtcagggttccgtccatatcgaatacaacacctctcaggcgagttttagcgttcgtcgttaaattcgccatggaaatcgaacaagaaggtctgagagtgagagaaataaatgttcttgataagaggaaagtcatggaaaagaaatggtgatgctcaaactgaaattgaggctcataattattctctatttttaaccaatttcggttcggtttaatttgaacaacttggtttgttttggtttagtggtttttcacttgagcatgtttgtgtatgtgcttaagaatggaaacaaagacaccaacaatctcaacaataatggttctgctgccttttctcttcttactctcttcctcttcggtaacggtttcttcttcggttcgcttgttggccgttcgggaatggtggtaccaagcccgtctaactcgtcccacccaccaaacttagaagccattccagctgaactacggttaactccacggccattgacattgtttctaacggttgatgggttgtatcgaatcctgctactacttctctccacttcttcttcttcttcctctatcccgaattgatttgctattgatgtacctctgcgtttatcccaaccaatcaacttctggaacgcataaaataacaatgatggcccgattgctacggctagtgacacgaggaaagctttgggtccggtgctgaagaaaagcgataagatgatgaatgggaggagatatccatacgatttgaatgcctacaaagtgaacataaaccaaacacaataaagatcccacaccaacaataagagagcaaaatctggtgtatgcaaataaaatgcagctatatatcaacaaagccgtttctcttatctttgagcagaaagacactatctagttagaaatcaaaactagttcagattcactacacaacgatattaactgtttcttacatgatcaccataaccattaccaaagaacaattttgatactttaatcaatcagcattttcaattagcagtagtagattcccggctaatttcataattaaggcttaaaagatgcatgattgaaactaattacctttaaaatccaaacattatctacaatttcctctaagatcttccacaggtcaaaattagcactaccaattccaccaccaccatcatcttcatcatcatcgtcttcaacattatcttcaaaaagttcttcccatagctcccgccgcttccttcccctttttcccctttccgtcaaacggtatcccctaccgtcatcagcggcggcgcatattttatagctgaatctccggcggttcagctgaattatcttcgccgaagttactctagagcatgaggaagagaaacagaggagttgagaacgagagggaggataagatctagggttgtggaatcgccagacatggaggtttgagaaactaagataagtagaagctcgcggtaacgaaagagctcctctatccgccattaacgtctggcgaagcgagaacagtgaagaaaatgctctgctccatgtatagacacactcaacttgcgccacgttgtcatcatctcctccattagaatcgaatactataaaccggcttggtccaggagaaatgttagaactgaaatccggtataattgcaggggtaatttcgagatcatcaaatgtctgacctgacacgcctacgtggattctcttttctcttcctttttccagaaacgagggagagagagacgaagcatcaaacaaggcaaaaacaaaaaaaaaccaggagagaatattccgagggaaaacgcgagaaaatttcttacgttctgcgagaatctccagctttcctggggaaatattggaaggcaaaagccgaagggtttaaggtctctgtaatcgtcggagaaatttgaaatatcgtccgtaaaacgtgaatgtagtcttaatcttccgcatttataacgtcgatcagagattttgaagctagtagagagagagaagcgttttgtgtttgatttatggtgtttggatccatggtgtggaaacaccagctgattgggttctcagggattttttctaatgtttctcccgttggaaatctttattcgggatcatttctaggaaaatcagaccagatttggccgtgataatggtacgagtctctcttctcttatctgcattgcgatttctccgtgttcttcatttttacctttttttttttatcttctgtaaccataattgctatttgagctgatttttatgttgccccttacattttagatttcattataagatgtgtctaaaagagaacaaaagaaccagctaatgaagcttgacaatattttttttatttgtttctaatatattctactttaatcaggcttcagtgaaggtaactgtggggtcacaggtctgggtggaagatccagatgaagcctggctagatggagaagttgtggaagctaacggtcaagagatcaaagttaattgccaaaccaagacggttagtcccttttctccaaagcaacgagacaatgtgttagttcttaaggtaccttaagaatacattgctcatatttgtgatgcatttgtttgtaggttgtggcaaaggttaatgctgtccaccccaaggatcctgagtttcctgagcttggtgtggacgacatgacaaagcttgcgtatttgcatgaaccaggggttcttctcaatctaaaagccagatacaatgcaaatgaaatatatgtacgcttcagcatgtaactcttgtcagttttccttctttcattacacccacttatgaattctatgattatctctaccattgttttgctgaaaattactgcacagttatagcaatatcattaatatttctctgaagtgtttgtagcaagctaatttcttcttgatggttacagacatacacagggaatatactgatagctgtgaatccctttaaaagattaccccacctatatggaaatgagataatggagcaatataagggcacagattttggcgagttaagcccacatccttttgctgttgctgattctgcatacaggtaatcttttgttgcatagatgaaactttaactaatgttgcactatcatttttttttgggcctcaccatcatcaagaatataaatttagaaaaatgatcaacgagggagtaagccaggcgatcttggtgagtggagaaagcggtgctgggaagacagagagcacaaaaatgctcatgcaatatcttgcatacatgggtggaaaagctgagagtgaaggacgatctgtcgaacagcaagttttggaggtagatagtctgtttacaatgcatctacattcttactagagacagactcactgagtttctctctgtagatatcttcttattcttctcgtattatgatcctgttatgcagtcaaatccagttttagaagcttttggtaatgcaaaaaccgtcagaaacaataattcaaggtggaatgtcattcacatttcttgatttttcaagtttatgtatgttcttgaagtcaaccttgacatatgtaggcaaatctcatattgcagtcgttttggtaaatttgtggagattcagttcaatcatatgggaagaatctcaggagctgctattagaacatatttgctggagaggtcacgagtttgtcaagtttctgatcctgaaagaaactatcattgcttttacatgctttgcgctgcgccagaacaggtaaacatggtcccttgtatgtttacatcaggtcgaacatatgaaggctctgtatgtccagtgcttggccatatatgggattcatactgaaaactagcttctgttctgaaatttcaggaaactgagcggtatcagttagggaaaccaagcacatttcactacctaaatcaatcgaattgccatgcattggatgcaattgatgattccaaagaatacctagctacgaggaaagctatggacgttgttggaattagtcctgaagaacaggtaccttttgttttttcattgacatgatcagcaatgaggataactcttcttacattttacttttgtaggatgcaatctttcgggtagttgctgctatccttcatctaggaaacattgagtttgcaaagagcgaagaatcagatggtgcagaacccaaggacgataaatcccggttccatctaaaagttgctgcaaaacttttcatgtatatgcttcactattatgtgttctcggattacaggtttcttgtcaatgggaggtagaaccctgattgctcttttttgggtaggtgtgatgagaaagctctagagaactccttgtgcaatagggtgatggtgactcgtggtgaaagcattacaaagcctcttgatcccggtagtgcagcactaagcagagatgctcttgccaagattgtctattctaaattgtttgattggtaggtttacaataacggcttctttcttaagggcttattatcaatcctgggatataaagttttgaaagcttacaaatttattgctcccaggcttgtgactaagataaataattccattggccaagactcaagttctaagtacataattggagtcctggatatttatggatttgagagtttcaagacaaacaggtgcttaaccggtacgctaccaaaatgttcaatttcctttttcgagttgatttataaactccctatactgcttcctgcatggctgcctatatgctctctgatttagtcttcttcaaacattgagcagatggtttgttattggatttcttaagttttagctacttagctagagatttttttctggtctgggacaatattattattattctcataattgattgttcctagctgttatatggttcaactgatagcagttttaatgcttgtgttacaattacaacgttgtctttctcttttcacattttgcagttttgaacagttttgtataaacctgacaaacgagaagctgcagcagcatttcaatcaggttggagactgaggttcttttcatatttttgattcttgattgatctaattttatgctgatccatattcatgcatatgttcctctcttctacagcatgtgttcaagatggagcaagaagaatatactaaagaagagattgactggagttacatagagttcattgataatcaagatgtccttgaccttatagaaaaggtaagtagtatcacaatgagtggtgttggaatctttattccgttttctagcagttccagtttcatacatatttattgatttctagcacctaatacagaattgttcaatgtcagaaacctggtggaattattgctcttcttgatgaggcttggtaatgtaccaaagcgtcatgttctttcttcactgatttctttttacttcttcaataagtggctgagtttgtgtatgcctctacagtatgttcccaagatcaacacatgatacacttgcagaaaagctataccagacatttggtagccacaagcgttttaccaagccaaaattggctcgtacagactttaccatctgccattatgctggtgatgttagtgatttaatttactacagaagtttgtgcttaaatgtttgtctttaagtaatggcaaaaatgtcaatgtggtgtaatgactgtattgatgttcaacttcaggtcacttatcagactgaactatttttagacaagaacaaagattatgttgttggagaacatcaatctctcatgaactcttcagattgttcctttgtctcatcgttgttcccaaaatcgcgagaggaatcgtccaaatcatcaaagttctcatcaataggctctcaattcaaggtctactaatgatgttaaattcattaaattcttcttatattgtttttccggtgattctcaccatgttataaattacagcaacaactacaatctttgctcgagacgttgaacaccacagagccacactacatacgttgtgttaagccaaataacgttcttaagccagaaatatttgagaacgttaatgttctgcatcaacttaggtgtggggtaagcttaatgtttcagagaaccatatactgttattttttgcaactgcgacaatttttcggtctttacgtgatgttgtgaagcatacttttctgacctcagggggtcatggaagccattaggattagttgtgctggatatcccactagaaagcctttcaatgaatttttgaccaggttccgaattttggccccagaggcaacggagagaaggtagattctccaatacatattttgcagttaaattcttagcctaatgttaaatagacgttaaggttttagactgatataaaccttttctctctggccttaatattctatagctttgatgaagttgatgcttgcaaaaagcttctagcaagagtggaccttaaaggttttcaggtgcgtttccatatacttatcacacagttcctggattgctgcctttacattgtgatttccaaaaaaagagatacaaagggtacaggcaatgccacttcggatatattgcctggttacactgcacaagattcattaaattttttaaatcacagatagggaagacaaaggtgtttcttagggcaggtcagatggcagaactggatgctcaccgagcggaagttcttgggcattcagcaaggattatacagaggaaagtcattacgtatctgtctcgcaaaaaatatctgctgttgcagtccgcttcaactgaaatccaagccttttgtagaggtaatacatgttctatgcgattgctcgtcgggtagattattggcgtcaaatatagtttcatgtctaacaaggcttctcccaactcatttcaggacatattgcacgcgttcagtttaaggccacgagaagagaagctgcttctgtgagaattcagaagcaggcacggacatatatatgtcagacagcatttaaaaagttgtgtgcttcagctatttccattcagtctgggttgcgtgcaatggctgctcgagttgaatttcaatacaggacgaagagaaaagcagcgattattattcaagcaagtttaaaacctcatattgatgataaagatctctcctttttcgtatcttaaagatatcaaatacttgaatttgtttgtgtatcaataacatgtgtgttactgattccacagagtcaaatcagaagatgtttgtgtcgacggcggtatttgagaacgaagaaagcagcgattaccactcaatgtggctggagagtgaaagttgcacaccgagaattgcggaagcttaaaatggtgactttctctcttagctaacaataaaagctctttctttctctaaacctaatttatacgatcctaccttccatgagatgtacgtgaatattcaacatgattgtcatcaagatgttgaaaaattgtatacttgtggattggaagtttctctcagtattttttgaatcttttaaggttctcttttgagagctcaagttgatgatctatagtcaattttatgtacaaattcacagattcgaatgtatcctgagatttcctaagatatttttttgtcttccaggctgctaaggaaacaggtgccctccaagacgctaagactaagctagaaaaggaagtggaagaactcacttcatgcttagagcttgagaaacaaatgagggtacacatctcagaacttgcaatagtagatcttttgttgatgtttcccttttctatgtgaagcatctgatctgcctactgatgcagatggagcttgagcaagtcaaaactcaagaagtcgaagatttgcggtcagctttaaatgatatgaaacttcagctaggggaaactcaagtaaccaaaagtgaggagattttgaagttgcagtctgctttacaagatatgcaactagaatttgaagaacttgctaaggagttggagatgacaaatgatcttgctgccgaaaatgaacagctcaaggtaaggtcataaagattttgaaaatatgatcgtggtttctctgtcttatttattttccttctaacttctaaggatttggtgagctcgttgcaaaggaaaattgatgaatccgatagcaaatatgaagaaacaagtaagctaagtgaagaacgagtaaaacaggaggttcccgtcattgaccaaggtgtaattatcaaactcgaagctgaaaatcaaaaattgaaggtaggatttcaagatattgttttatgatagacgacccagatttgtggcaaaagcggttcatttgagatttcaatgttttctctcggtaattgatatcttaacaagtacaacgtatcgtaggctttggtcagtacattggagaagaaaatcgattcattagacagaaagcacgacgtaacaagctcaaacatctcagatcaattgaaagagagtgcttcatctgattatgagatgttgagtaatcttgcagcagagaatgaacgtctgaaggtaaagttacagtgacatagctccactcctgattctttttaagttttaggtttgtttttcccattgttctgagtatgactcttctcaggcacttgtgagttcattagagaatgaaaattatgaaaacgatggaaatgattcaccaaacgagcaaaaggaaggaccacagatgctcaaagaagagatattagcagaagatttttcgattgatgatgaaatgaccaacaaacttgctgctgaaaacaaagatttatatgttagttttccacaaaatgtattcttctccattaaaagtttgtgcgttatgtctctcttaaatttattgaaattctacaggatctggtagatttgttggaaaggaaaatagacgaaacagagaagaagtatgaggaagcaagtaaactttgtgaagagaggcttaagcaggttgtggacacagagaagaagtatgaggaagcaagtagactttgtgaagagaggcttaagcaggttgtggacacagagacaaaactaatcgagttaaaaacatctatgcaaaggttatcgatttgcattctctattttcccaaagtttcaatgtttcaatcttttctttgctatttattttcattttcaacagtatctatgtatgcattacttatttactcctaaatttaggctagaggaaaaggtatctgacatggaagcagaagacaaaattcttcggcagcaagcgctacgtaattcagcttcccggaaaatgtcacctcaggtgtcatttacaagaccacctgtaaaaaccctctattttccacttctcatattctttatatagattatattttcaagaaaagtcttgacctcttcgttttcatgtacctcttccagcctgtggagaacggacatcatgtaagtgaaaactagatgaattgttcttgtttacacttaatcatcttcgcaagtttttgttactatagaattataatagaaatctctttcttacaggaatcatttgctcctataccatcaagaaggttcggggcaatgtcttttagacgatctcagattgaacaacaaccccatgtatgtgcctaactaatacagcagtcatagtactgtgatacttgtttgaattggtcaattacttatgtcatgttgttattatgcaggaatttgttgacgtcctactcaaatgtgtttcgaaaaacgtcggtttcagccacggaaagcctgttgcagcatttacaatctacaaatgtctcatacactggaaactattcgaagcagagaaaaccagtgtctttgaccgtattgttcctatttttggttctgctatagaggtaacctggaagtttaaatagtaatcgctttatagtgtttatggtcaaagaatcattggaaatatggcgtcttgaatactacttctcagaaggtttaatcaatatgcgttgatatactttcagaacccagaagatgatagcaatttggcttattggctaacaaacacatctacactgctgttcttgcttcaaagaagcttgaaatctcatagtacaaccggtgcaagtccgaagaaacctcctcagccaacttctttttttgggaggatgacacaggtaacaaaatcctgtttatagactctaagaataccttaagcatactaatggccataaagctttaacttaagggtttccgtgtcttgtgggatttcctctaatatgacttccatatgtttagggtttccgttcaccctcctcggccagcctttcaggtgatgtagtgcaacaagtagatgctcgatatcctgctttacttttcaagcagcagcttacagcctacattgagactatatatgggatatttcaagagaatgtgaagagaaaactcgcacctgtgctttcgtcctgcattcaggtagaactatttatggtttccttcagatcatgatctctgctagataaggtcatctcacttattagttctcaactaatggatcagggactgaaagattcatcacatgagttctctgcagagactttatcagctgagtcatctgaacagaattcaccagaaaagccatctgaagagaatccaccggaaaagctgtctgaagataattcatcaggaaagctgtctgaagattatttagcagcaaagccttctgaagataattcaccagcaaagccatctgaagagaactcacaggcaaagctatccgaagtgaatccacaggcaaagccatccgcagagaattcactggcaaaaccatctgaggagaattcacccacggaaacttggcaagacgtcattggtcttttgaatcagcttctcggcacattgaagaaaaactacgtaagaacttttctgtattcgaggatgaaagattgtgtttgattctgtttactcctagatttccactctgacaaacttcttctttcaggttcctctgtttcttgctcagaagattttctgccaaacattccaagacatcaacgttcaactctttaacaggtaaaatatttacattcccccatcaacctttaacgaatataaatcacctaacccaccatcagccaataaacttaaagctgtaatctaactaatgcagccttctgcaacgtgaatgctgcacattcatcatgggcaagaaggtgaatgtctggctaaatgaactagagtcttggtgcagccaggcaactgaagatgtaagttcagttgttttaaatgattctagtaaccagacagtttcaatcgcttgatttcacttgtcgattaagttctcctgaatgcagtttgtaggatcttcttgggatgaactcaaaaacacaagacaagccttagtgctattggtcagtttcttatgaaccaaataacatcaacttaattaacatcacaacactcttgcttctttctcgttcctgaatgtttcatcgtaatcctcttccaggttacagaacagaagtccacaattacatatgatgatctaacgactaacctctgcccggtaactactctctgcttctctgatctgaaaaaagtctttaaatattataaaacatgcctggaaaatggttaggatttgttgtattcctcatcttatgatctttatatctgtctttaatctctcaggctcttagtactcagcaattgtatagaatatgtaccctctgcaaaattgatgatcacgaggatcaaaatgtatctccagacgtatgtttgctctcaacatttctcagataaaccaaattacatatttccaatctctacatcggcttcatatatctatgggtgcaggtgatttccaacttgaaacttctagttacagatgaagacgaagacagtcgttccttcttgttagacaataattccaggtattgaagatttcacaatacgcctaaatttctctaaattgttcaaacatcatcaccataacctcttgaatattgtcttggtgaaactcagcatcccctttgcagctgatgaaatctcgaactctatgcaagaaaaagactttaccaatgtaaaaccagctgtggaactcgctgataaccctaacttccactttctgaaggaatgagacctatttacttggcaatgaaattgtatagtaatcccttgcacagttttacgatttgtagaatcttgatcgatttcgtcgtctaggctttaagagggcatgttgagctcaagtgtagggatcgctctcttcttttgatttgattcttatacgttaattatcttcagggtggtggtggtggttaggttaaagccagccagtattttacttgtaaggcaagaaacttctctatgtagaacaaacgttagtaatcagttttgtaaccttagtcccttattgggtcagagattcataattggccttgcgatattgttcaaatttggaggatctttttgcattttactaacactaatgtttaatacatcaatcaaaacgagaaaaaaagtggcagtaattaatccagtatcgaagataataatccaggctttttattttatttttgctaaaaatgtgaacatgtcattaaaaatgaaaaaaattaggattgactcacaaaaaaaaaacatggaacaaagaataatcagtccgtcgatcaacaaatacaataatgtttacagaatcaatgaagtgataaaagattttgaagaatttccaaaaagacgtctcaaggaggaagaaacgagatgtcaaacggcgatggtcgaatcattgaaaaccaaacaaaaacaagtctttcaacacggtagcccgggaagactgaaccagagatcatgaacacgcactcaacatgtgaaagcatctcttagatacgaccatgagctttctcaaagtggaaacagacgaaccaaaagaacaaaagcgctagctcactctaccaagatcatttcccaaggttggctagcacagaccaaaatccactaaaacaaaccacgctaacactcctaagttagctaattgacgacaaaccaaagcactagccatctccaatcatcaacacagtaaggtaacatgcattatacatgtttgaatcttgatagggacacatcaatgacagtaatataatatcattatattatatgtatcggtttttaatatagttatgtttatggtagttttagacatttaaaaagattgttgtaatcgtatgaaaaaaaaaaaagattgttgtaatttaaagtagtgatattatttgaaaaatactaacttagaggataccctatttctaattttgtttttcaaaggaagatgaaaattgatggaatggggttatagttaactaagttagttaccaatggtaaaaacacctgatgatgagtctgagtctgagtgtgacactgaggaggaaaaacatgtgaatctgatcacatggtcttcccatactcttttagttattacagttatggaggtttgtttgcatttatcatcttctatttcttttgtcccttttctccatcctataatatttacatatacatgcacgtatatctataaatgtgtttgtgcaatgattttgccctaacaaatattgtgaaccaagtgtttttcttttaattttgtttgggttgattcctcaaagttaagccgacgtcgcaaatgcaaaaaaactatattatcttttttcttgttaatgtaaactatattatcttatcatatggtgatcgactacatatagccatatatatctatgtgtgcatgtatgaattcattatttgacctctttaaatatatctcttaatatgatccgctccagtattaaagaacctataacgataattaccactaatttagttaggaacaaaattgttctttttttcctggttattgttgttgttttggtttaaactttaaagtagtatacgtatataatcgttcatttcaaacgttataatgtgttctaatgattggctataatctatttataatgtacgcatattcccagcacgtgatttgaccaatatatttgtctgagtgtgtgcatatgatgagaaatggtttggtcgcttcatggaaatagtcgaattatttactgcattaccgagtactattacatttctattcaaataaaaacgaaatattacctatagcttttagcatatctttgtaactgaatccaaattatttttaactggattcaaattacgattgtattaattttttcttatcagttttttttcagcttatatagaagttgtttatatagaacgcaatgatcacaagtattacttttataatgtataaacgactctcaagtatgcgatagttttattaaatctaggttgttaattacttgctagtggcttaacagttaacactgggagtctgggaacactcttttagttttatcatttcaaaaaggacaatagacctactcatgactcatcgatagagtgaatagtctcgtcattccatggagccatgaatttcataattatcaactaaatctaaagttcatctatgaaactaaaactattattaaggctagacacgtcatatgcatgcatctatacacattttccttatattaaacttaaaaaggaactctagattttggtgagaaaaatctttgcccgattcaactccactacgtacatatatcactctctcgaatctcgatcgaggtttcctgaagaaatctagttttcataaatcatgatattagtttcttacacaacatgattcgatattatcgatgtgaatcatttataatagattgcagagaactatagtatcctaagaagttatgaaggatataaaaagataaacagaaaacgtaaagaaaacagagtagttatgttgtagttcatccatcattgggtgtgttggttatttaatttctactggcaaaactcaaaagatatccatttcactttttctgtgtggattccaatgcatatttttcacacacacatatgccctattatttttacacaaaatatactaagaaatgtttatatatatggagtagatatatattattaacaaatatgaaaggctaactatgagaatcttttgattcaatattgtactacttgatcaaaaggttcttaatgatttactactaaaactaaatgagatttcttaacttattatagcaagacgataaatgtttaaaaacaatgaaaaagtattgagattgttttggaagtaaatgatacgtgttcaatctcaagatttttaatgttaattaatacttattcaaattatttttacccaaaatacgatgttgagaaaaatgaaagtatttttatggtaaaaatatagaaaagagaaagatctttatcaaaaagaaaatagaaaagagtggtacaatgagatcttttgggatttatgtattaaattccaagattaatagttctataaataggggttattcaggatccaaaaattacagaccatttttcttcaatagacttaaaaataataatgggtttcacaaaaatcgtagtgactttctttcttgtagttatgttggctgtttcgtcgtcctcccaaaacgctatggcatcaggtacttttttatatataataataatgcacctatagtaactaaaattagttagctttgatcatgtaaatttttaaaagcgatataaaaatggagaattttgagaattatcaaagaatatgaatttttgaaaatgtaatttggcatgttgtggttgtagttagattaatgtggagtttgtgtatatatgtgcagagatcaaagcaaagatcaatggactagaatgctttaatacatgtacgccttattatgatgattataaatgcaatgtggactgcctatcatcgggctacccggcaggagattgtcatatcgtgtctccttctcaacctaaaaaatgttgttgttattaattaaaattgatgatccggtaatttccttatgtttttccttataactatgagaagcatgtggttaatttctcttgtaataaaaattccatgaaaataaaagccatctttcaaatacacaggatgttctagattagaggtgaaaacaataatacaagaggaataattgtgtaaaattattgtatcacaatatgtactgatatttcatcattgcattaaaagaggaattgaccaaattaatttaaacatgaagaacccaaattttacactccagctgcacatgaatagatttcacatttctctttcagcctcatgttatgcgtatctaaccctagatttggtttgtgcattgatcgatgtagatcttcttaaaacattccaaatctatatgattaacttatcacaagaacaatgtgtttaactttagtatggtatttaacaatttgtttaactttagtatggtatttaactaaaaaaaactttactatgatgctcttcggacgtaacactttgcgtctaatgaacgggattaaaaccctcggttttaggtttaattgaactcatgagagtggtcgttttcttgaagaaacaatagaaaagctaaatggacccatttatgatcctgtctctttttttaatagaatgtctgctccttttttctcaaagaccggattaccggattagagaattctcatatagtatatgtgggtttgtatccgagtggtgacacaacgccgattctaacacaaatcattcggatacatcatacatgttttggtcgaatataacacaaaccattaggacacaacaatagtttaaacacaagtcattagccatgatgtaatataatttaggcaaaacttttcaataagtgtcagtttcattcttataattataatccggtatatgtatattcaagtattgatctcttcatacatagcttaaatcaattaataaatgcggctacaagccaatcatttaaccatttagaagttaaattaaatggagtaaaataatcaaataatcatcttgagaaataattttttcaaaaacaaaattccaaattgcgtaaagctcttctctatataaaccctttcccctcaatccatctatcatcattacatcttttcttgccctaaaagtaagtataaatacactaaaaagctcccaataagatgtgtaataacaataacacaagttgtgtcaacatctcaagtatgcttcagcctgaggacattttctcccgtcgttgcatctgggtgaatgggcctgtcatcgtcggtgctggcccatcaggcctagctgtcgccgccgacctgaaacgccaagaagttccgtttgtaatcctcgagcgagctaactgcatagcttctctgtggcaaaacagaacctatgatcgtctcaagcttcatctcccaaagcaattctgtcaattacccaatttacccttccccgaggatatcccggagtatccaacgaagtaccagtttattgagtaccttgagtcctacgctacccactttgatctccgccccaagttcaatgagacggtccaatcagctaaatatgacaagaggtttgggctgtggcgggtccagactgttttgagaagcgagctgctcggttattgtgagttcgagtatatatgcaggtggctcgtggtggcgacgggagagaatgctgagaaagtggtgccggagtttgagggtttagaagattttggtggtgatgttcttcacgctggagattataaatccggcgagaggtaccgcggaaaacgagttctcgtagttggatgtggaaactcaggcatggaagtctctcttgatctatgcaatcatgatgcgagcccatcaatggtcgttcgaagctccgtaagtaaaattcagtaaattatacccaccaagttacgaaaaacagagcaccctgattcttagtagctcctctgtttaaaacagagcatctgatagttatactctgtttttccttgttcgatcaggttcatgtattaccgagagaagttcttgggaagtcgacgttcgagttaagtgtaacaatgatgaaatggatgccggtttggctcgtggacaagactcttctcgttctcacaaggttacttctagggaacaccgataagtatgggctcaagaggcctgaaattggaccgttagagctgaagaacaccgcaggtaaaactcccgtgctagacatcggagccatttcaatgatcaaatcaggaaagatcaaaatcgtagcgggaatagctaagtttggtccgggaaaggtcgaactcgtggatggtcgagttctgcagattgattcagtgattcttgccactggttacagaagcaatgtcccttcatggcttaaggtagacaaaagtattatctttttcagatttttgtctcaaaagataacattttataggaccatagaataccggtattgatagttatgggaagtttgataaaaactaagacgttgattggtgattgatttattgttatgcaggaaaacgacttgggtgagattgggatagagaaaaacccatttccaaaagggtggaaagggaaggctggattgtatgcggtgggattcaccggaagaggactctcaggtgcatcgttcgatgcaatgagtgtagctcatgacattgccaatagctggaaagaagaaactaagcaacagatcaaaactgtcgctactcgccaccgtcgttgtatttcacacttttgattttcactgtttatacgaaaacatatatgagaagaggtaaaaaagagaggatcgatagtgttatgtgatgtgaaaatcaaagagataagcccactccatgagagtataactgtgaaatgtgtttgagcttattttcttgtaaggaggatgtggctccatgtatttaacgtattctttaacattccaacttatcttttgttagcaaatgtgtttgattagagctgatctagaaagtttaaaacatgattagtttaaacaaaatatatgaacatgtgtctgaaactgatttcgtcattgacagaaataagtgaatgagggaaaaataccgaaaacattcctccgtaccgtaccagcaatacatgaactgtgtatgtatcatttctcttattatacgatggaaatatagagacaacaaacatcaaggttctaaaatgcttaaacaaacattcattcatcatcatcaaaaggagccattgaaattttaccagacatcaggacgaagctctccggtagctggaggcatccaacgaccagaattgtacacgttttcaccgactttccatccaggaacatccttcatcacatccgcctcgtattctagatacttcttccactcagacacaaacctatttacaaatcaacacgtggtgatccaatgtgagagtttgtaccacacaagcaaacataacttcttttgtgaatcctacctttcatcttcttcagcttgaagaatcggtagaattgctctacgtgcagcgtacttctcttccttcaacgccctatcatcacagcaatcttcattaaaactttggagttgatacattgtgctcattttgacacttttgtcatcattatgcaattgagagtctaacaatagaagactattagagaatgtcacttacacacaccaagaaagataacactgtgttgtcttattcgttgcaaattactccaaatcgacactaatcaagctaaataactcacaatgtgaccatctaaaaaccaatatgcaactaaccactagtatatcatcttgcaatttgattgctttcttcatcacagctcaagagatcgttaattagtaaccaatttcgagactaaccacacaaatttataagcatcaatcccaaattgtcttaagattcaatcccaaattactcaaaatttcacaatagagaaaagcctaaccaaactcaaattccacatctcattatctaattacctgcggattttgttgccctgaccaacttggtacatgccccaagcaaaagcaccggaaacggtaaggaaaatagccatggcgctaggtcccgtgttggagatccggcgagcatatcggaccggcgcgaatccaccaggtggtggaccatcctgaagcaacggcatatccttcacactcgccattcctggcttcttccttatcatcgcctccgtcatcttcttcctcgattgatccccaaatcgatctttgattcgttaatcagtgtgtgttctagggattctgagaaagacaatcagaaatgaaatgaaatgaaaaatcttttttttggtgactttttttttaaaatgttgtaataatgaactgggctttaaaaggcccatattaaaatagtaccgggtcaaaactcgaaccggatccaaaaccggaggctaaaactcgaccaagcaatgatgagcttggagaaaacgtaaaaccctaaaccctactgcttatagaatcttcgacgatctgcttcatttctcctcatctacgagtgagagaatttgtcaatttagcttctttagttcggtctgatctgaattaattgcaatcttctcggttgtgtgagagaatcaatcaccatgtatcggcttgtctccaacgttgcttccaaagctaggtagatctattcgactttttggttttctttgtgtatatgattccaatgctgctttattttctgtgaatttgtttctgattggatcctcgaaatcggaaagttgcgagaaactgttgggaattgaatcggattttgatcggattgaattgaatatttctctgccattggagagtttagcatcttctattttctttgtatttctggaagttgcttcatttattgatgggatttatttttctttgtttcaacaggattgccagaaagtgtacaagccaggttcgtgttcttcattttgtatctaatttgtggtttagccgtttgtgggtatgtattgatgtgaatttgtgtattgttagattggaagcaggctcaattctactaggaattatgcagcaaaagacataaggttcggtgttgaagctcgggctttaatgcttaggggtgttgaggatcttgctgatgcagttaaagtcactatgggacccaaggtataaacttatgtttcagataatttctgtgtaagagacttgtattgtaagtgaatctagttaaaaatagataacgtgacgacctattgacaagtatcaacaatcgtctgttttgttaccctcacactctctgatactacatgtctaaaaccatttttgaagggtcgtaatgtcatcatcgaacaaagctggggtgcaccaaaggtgacaaaggatggtgtgactgttgccaagagcattgagttcaaggatagaattaagaacgttggtgccagtcttgtgaaacaggttgctaacgccacaaatgacgtagctggtgatggtaagtgttccctttcaatggattaaaacgttttttctgtttttgctaattgggttgttagtctcctatctactcatattaatcggtgtttttgtatctgacaaaatatatggtatgcgttacaggaacaacgtgtgccacagtccttactagagctatcttcacggaaggttgtaaatcagttgccgctggaatgaatgcaatggacctaagacgtggtatcaaattggcagttgatactgttgtgacgaacttgcagagccgagcacgcatgattagcacctctgaagaaatcgcccaagttggaacaatatcagctaatggagatagggaaattggtgaactgattgcaaaggctatggaaactgtcggcaaagagggagtgatcacaattcaagtgagttgaattttatccctaaatgtcaaattattttgcttattccttaaggtgaccaatgttatcatctcttgattcaggatggcaagaccttgtttaatgagctggaagttgttgagggtatgaagattgacaggggatacatctccccgtacttcataactaacccgaaaacacaaaaatgtgtaaggattcccaccttgttactttatcaatttaaggaattgcggatttaatttgctctgaatgaatatgtgttgcaggaactagaagatcctctcattcttatccacgagaagaaaatttccaatataaacgcaatggtgaaagtattagaactggccctcaaggtataaacaatttggcgatttcttcactgtcaatagtgtctgatattcattaagttactttgatctgaagatcgaaatttattttcactgccatttttcagaagcaaaggccgctgctgatcgttgctgaggatgtggagagcgatgctcttgccaccctaattctgaacaaacttcgtgctaatatcaaggtttttcttttcagccttttgttatttgccttttccttacaacgtcttagtaaaaaattaatttgattggattgatgtacatggtattgctttataggtctgtgctgtgaaggcccctggttttggagagaaccgaaaggccaatttacatgatctagctgccctcactggagcccaggcatgcccatgtttctttttataataactgccaagaccatcacacccacactaatcggatgagccataatgtgtctttggtgatttcactttgtaggtaataacagaagagttgggtatgaatctagacaacattgacctcagtatgtttggaaactgcaagaaggttcgtttggtccaattccttctgctttctctctttctcccttgtaccttctgataacttggttttcatttgttaacaggtaacggtatccaaagatgatactgttgttctcgatggggctggtgacaagcaagcaattggggaacgatgtgaacaggttagcgtgtttttcgcttttttatcatttagtggttcagtgtcatatacctttgcccttttttccaactggtagttttaatatgttttgaatttttattaaaccacgcagatacgatccatggttgaagcaagcacttctgattatgacaaggagaagttgcaagaaaggttggctaagctttcgggtggtgttgctgtactaaaggtaatgtacacctcttgtgaacatcagactaataggctattaatgcattattagtttattactaatgtcgagattactcatatgggtttttagattggaggagcaagtgagacagaagttagtgaaaagaaagatagagtaacggatgctctaaatgccactaaagcagccgtagaggagggtattgttccaggtataatctatcccaaatctaaaacaaaatttggttgaatcccttaagaaaattgcgtgagaagagaattatattactttgtgtgtattacaggtggtggtgttgctcttttgtatgcttcgaaagaacttgagaagctttccacagctaactttgatcagaaaattggtgttcaaatcattcaaaacgcactcaaggtgtttctctcatcacattgttcatcctcgctagcataaacagcttctagaatcttacacacaaaatctttctttgatgcagacacctgtttacacgattgcttccaatgctggagtcgagggtgcagttgtcgtaggcaagcttttggaacaagataatcctgaccttggttatgatgctgctaaaggttacactcttatatgcattagataattcactttctatagttcttgatccaccttgttatatatttccctatattccgaaatctgaactagcttcttttggcatttactttcaggagaatatgtggacatgataaaggctggtattatcgatcctttgaaagtgatcagaaccgcattagttgatgctgcaaggtacacaaagattgaaaattggttgtccaattttgtattttattgcaatgttttgctaatttattctattggttagtgtttcgtctttgttgacaacgacggaagcagttgtgactgagattccaacgaaagaggtagcatctccgggtatgggcggtggtggcatgggcggcatgggtggcatgggcggtatgggaggaatgggtttctgaggagaactataaaccctgagtagggttctttggaatctgttgtgagagatgctacggttggttcatccacaagacactaatgtattctttaatcatgattggtagagagagaccttcagattttccgtgattttcaattcacaaacgatttataaactattttgaagaagatccttttccgattcatgcaaatttcttccaaaaataattcagattagagagttcagtgaaacatcaagtaggttgtgtttgcgcatatggaggagattccttagttctcgccaactatcaccaaacccttatatcttattaacacgatatttagctgtttatttatatgtggttcaagtaacagactacttatttcaaataaaaaatggaaaaagcttttttcatagaacgaaacaaacgatatagtgtagtttaaagtatgttacccgaaaaagaaagcaaatctacttaacacggtccacaattcgcgtggtgaagaaggttataattgggtcccaaaacattcatttccccccaaaaaaagtcataattatgaaccaaactctttttgtcttcacgtctttgtccgttccataaccatagcttgccctacttattatagcagtaagccataatcaaggaaaccgtatttgtatgtaacttaatattgtggattgattacagcttggagggaattgattcaatttggccagttggtcaaacgcaatggtataagtccaccgaactagatggcaaaaacaaaaacaatttgagaatgttcttaaaagttccagttcaaatgtgttgtaaatagtcaaattccttttacgaacgatataaaagtagtcaaatagagatagggaataaagaaaaatacttatctagatgatgaattagcttaacgagaaaactattagtatctgttttggcaagaaaattttatgtctcggttgattacacacactttttagttaaactacaagtaatcaatcatagattttactttaagaaagttccacaaacacgacgtggctgtccattataacataacctcgtggtcatggaatgtttcgtcttattttatttttaatattacacaatgttcaaagttctcaattagcaagtttcatgtggtgtgatgaaaatcattaaccataaaaaccaacactcaagcggaaatccaactctcttaaattaaaataattcactcaaaattttattttcatttggagataaaaatataaattggtcaaaagcaaaataaagatagaggtcatcaaatcgtacggctagaaacagaagtgcacagagttattacgatgaaaacgttacacagaatcattttcatacaccaaaagctctttctttttgtattttaaatcgagtttcgaaccgctctgcttcttctttactctctgcgtgattatcgtgtgagaacattgaactcacacttcaactctcaagcttcttcttccttcgccttcttctcattcatttgcttctgtgtctaattttacatagcgaaattccagccatagccaaaaaaaaaagggtcagattttttaaacggatttttttctctctctctcaattactgataatgagtctaattgagagtttctcttttgacctgttgttcttgttcttgtctttagattctagggatgttcttaaagtcttggttgattacattatgatccttctagagtttgttctgtgtcatcaatctaaaccaaatcgctcatattcttacagaataaaagaattgatttagacactttttagaattttgtatacattggatcaagtagcattcaaaaaataattactgttctctacattttcagtacttacaggttctttaatttcagtttcttgtaggttttggcaatgaatggatcagcggaagctacacggacaagaccattgcagatcagtcccggtgatttagaggctgctcatctagatgaactcataatggaaatagaacagaggagtctctattattaccaagagaaaaacaagtccttgagagctcgttatacctacggaaccattttcttgatcataaatctatgcgcttggtttatccgtgactacgcacaaaaggctctggccttgcttccatgtatttttttcataaatcttttgagatatatctaatgttgaagttaaagatactttaagttgaaatcatcattgcagatgtcagcagttgtggaccagaaggaagtcgttgtttccatacgcttggagtactccgcgtgagtttaggatgtttcgtatcctgaaatatcaaatcttttgctgatagagtcatacttttaagtaatttggtatgttatatagtttatccttagcaatgaagatattttactttgttatgttcctctcaacatggaacacaatgaaactccacgaagctcaaaacagctggcactcggataattggatctttaagttttttctactggttatagtcatggtagcttctttcttcatacctcagctttacatccaaatttatggtatgcttctgtctcactataactctataatattctccattttatctaattggtttggatcacgacaatgatgttttccttacaggagaaatcgctcgtgttggtgcagggtaaaatcatctttcaagttatactcttcttataagataagagaataagagaaacacataattctcttaccatttctattgtttcaggatatttcttggtctgcaacttgtaagtgttatcgaattcatcacttggtggaataactattggatgcctcaaaaccaaagtaagcaaaggtaagcaagtatcagtcattacaaaagcgttttctctatgtggatatatcaccaattggctaacactactgtgttttctgcagctgttcttttggtttggtcatgtcaatagttttctacatcggttctgtttgcgggatcgcagtgatgtactacttttatggagcttctactgcttgtggcctcaatatattcttcatctcatggactgttatacttttaatcgttatgatggttatttccttgcattcaaaggtacatttcctaagttttgcttaaaggtagcacaaagattgatctctgcttcgaatactgatgctttgcattaaaaggtgaagaatagaggtcttttgtcttccgggattatggcttcttacattgtcttcctatgttggtctgcgatcagaaggtaaagacaaatacaacatctgatttttgtttgtttagttcttcaaagcattactaaagtagaagttttgtatcagcgaaccttcacatacaaaatgcaatgcgcatactcaaaacagccatactgattggactacaatactggtaagagctcaaagcctcttcttgagttcttgtttacttaagagtttatctaacttcttacttttttcagagtttccttatagctataggcgccattgtgatggcaacattctcaaccgggatcgattcagaatccttcagggttagtttacattcactctcatcttgaaaatcaatatttttcagtcacagacattttagatctttattacagttcgagtttcgtaaagatgaagcgaaagaagaagacgatataccatacagctatggattcttccaccttgtgttctccttaggagcaatgtactttgctatgttgtttatcagctggaacctttcacattccacagagaagtaaggaaaattccaatctgcacattctcatctgaaacaacaatactcagagtcatgactgtgaaattgtattatttatgtaacacatagatggagcattgatgttggatggacaagcacatgggtgaagatagtgaacgagtggtttgccgcagcgatttaccgtaagttaaaaatgtaaaactaaatggtttcagctcttgatctaacagatggctctaaacgagagatttgcaatcaaattatataccaactaggccagtaaatgacatttgtttactgagtttgggtttttattggtttgaatacagtttggaagttgattgctcctattgtgagacagcatagagttcacgaacaacctcagccaacagcagcagaagttcacagatagatagatgaactgaaattgactgtgacattgcaattttgagagctgtgtgttgtttccataaacaaattttagaggatcagttgtaagatttcttacaagattactataagaacttttatcaaacaaagattcattaaaccacaaacttccgtagaatttgttttgttaaaaatcggaaaaagatgaacaataaaagcctagaactaatcgatagtaatatccaaagtcaaagtagccaaaaaacacttagctctgctgattctctctgaatctttagactagaccaaatgagaaaccaatctccttaaaacatactcaagcatgtcctggaacaaaccagaaactcttcaagactgaagcatctaatgatttaggccatgtgattgtacttgtcgcaagatcaaatacaccgcacataggttgtgtgatgggaataaaaagctgactaagtggccaaagatcatcaccgcggaaacagattgaatcactcttgattcccaaaccattaatatctaagatcggtgctcttatggtaaccccatgaccaaatatcaacatctcacctccaagagaatctactctctcccagttacaacttccaaaatccatcttatatatataaaacaaacgcttatcttctaacccttttaagctcacgatcatcaaaacctctccagagttagtaatcgctacaacctgcttccaagcgtgttcctcgggcttcgaaacaaaccgaaagctaaacggatggttgcgatacggattctcctcgacaatctcactaggaaactcaccatataaatcaaaaatcttgatggagttatctaatgcatacacataaagcttgtagtccttattcaaagccatagacacacacttagtgccttcaagattcaaccatgaatcatctcctttcttgtaagtgaacaaatagtgctgtttgatactccaagccacaacataatcccctgttctctcatttatccaaagacaagcctgtttcttggtagagatgatgtctgtacgctcgatgaaatgtttccacgcaacttctttttccaatctctctttaccaagaatcgatgactccatcgatggaagattgattctctcacgagtgaaagcattcaggagatagaattctaaaccagaatcaaccatcaagaaccaattgctgcagctagcaagaacattcctatcggagaattcgattccgggatgttgaatttcgtggatcttgtcttctcttggatcgaagagtgaagttgaaatcttgttgaatttgattcgccatggatacagaggtcgcttacacgttgtggaagctgtgtaccagttagagcaaacggttcttgctcgatgataatccttgtagtgcaagctttcgagtatcaatcgcaaaatatcgtgacaaagcttggaccaatcataacgagttctcgacattgtttgtcgtcttcttcaaatcattccgatggttgtgaacttgtgatgtaagaaataaagtagggttaggtttttgaacaaaggaaaccattcatgggcctaagaccatattaatgggctatatatgtgacaagcaaagcccgcgaactaaaacagggttatgcgtatcaagtgtaataatttgtctgaaaagtatattagtgttgatgatttgtctcatctcttaattgtcactagaaacaacaactttagtccatgatttaatcacatatttccggtagaaaatcatacgatatctttattaaaaaaaattaagcttaaaaaagcatgttacaatcaaaaaactttattcaacgtttaacaaaaaaaaaaaacttattcaaattgttgataaaaccaaaatcagagactgaggaggagagttttagactaagcacatcctggaacaaaccaacaaatcttcgaagacaggtcttctaatcttgtatgccatgtgattgtacttgtcgcaagatcgaacacaccgcaaattggttgtctcttcattgtaagataatgatcagacaaatagtcatcataaagaaaacatattgaatcactcttgagtcctcccccactaatatctttgtccggtgctcttattgtgaccccatgaccaaaaatcaacatttcatctcccaaggactctactatttcccaatcaccaatcttaagattcagcttgtagatgcaaatctttttatctaaccctactaaactcagaacgattagaacctttccttcccttgtgaccgcaagtctcaacttataaatcgcatctacgaaactaaaaggatgactaagataagggttttcttccatgggttctttaggagaatttccagagaaatcaagaatgttgatgtaatgatcaaatgtatacacataaagcttgttatctttataagccatatcctcacattgtgtgcatgtgatactccatcgcttatcatcatcatcatttcctatttttttgtatgagaagatatagaactgtttgatagcccaagcaacaacgtaatctccatttctcccgtttacccacaggatagcagttttctcaaacctaaaatcgttccacgtcaagagaaacttggtgccgtagagctcaagaaagtatccagactcgtcatcatttcgtatgaatctaaaaggacgatcaccacgtagcgatgactctaatgaaggaagattgatcgtctcgcgagtaaacacgttcaagaggtagaaatctaaacgaggatctacgattaggatccaattaccataactagcaagacaatggattttggacaagtcgattccaagaagatttttggtgtagatcttgtcttgtattggatcaaacaagacagaattcttacctcggaatacgattctccatggatacagaggacatgatcgagatacggcataccagtttgaacaaacggttcctgctcgatgaaaatccaagcaactcaagctttcgaatatcgatcgcaaaagatcaggataaagctttgaccaaccattatcatctctagacattttcgtgttgcaattgttggaggcgtacgtgcgcttaacaatttaggattttttcttctcgtgtgaaacaaaagaatcattaattcggataattccgtttctatatctttcatgtacttatttttacatttcatttgtttataaaataattaagtacaagataattcgttggagacgattgatccatctcgtttgttcatattctaacaaaccaaaccaatttaaaaaaaaagaaatcttatactaaaacggtttaatgaatctattaaaataaataaataaccaatctaagccacacacttatggaatcaaatttggagctgtatcgagtttaccgcacgggtccctgtagactaggaataaaccacctcacggaaccaaacgttttactcgtgaaatccttttgaatcaccaaatgatcaaaaacgctaaacctaatcaaattagggttttactcgcacatatattattagttattaaaaaaaaaaattgatagtctcttttgggcttttagaaacgatgtatactttgctacaaagcatcgattttagatactcaacagagttttaacaactcataagcatcatcaaacttcaaagtcacattaagcagcaagaaagatcaataaatattttccaaatgaacaaaatggaagatttagaaatttgcaggactatcatcgagttgcttttcatcttcaatattaacctccaaaatctcagggatcctctgttttaagtagttcccaagtcgagctagaaccattgcacgcgtatgccaaaacttgcctcttaaacttatcgtaacgaatggtccgtctagttccactaactctacttgtcctgttatcccaaccgatgagtcgaagagttgtgctagctatcgtacaaaaccaaaacatgaatttcgatcaaaattcacaaattcggaacctctagtttagctctgtaaaaaactgaaaccgaacaaagattgtttcctctacaagcaacaatgctctgttttgtttttttcatacggaacacaatctctcaatatgacctagaaccggttcgttacggtttcggtctaaataaattaaagaacataaccaagcaggaagaaaatcggaccatatacgttggtgcaattcggttatatactgaatgccggttcagaatttatttcgtactaatcttggattaggcaaaagcggttaagaagaaaaagcttacctcgatacgagcttcggatagtaccaaatggatattatcctcagtcaaatccagcggcggaagcgaaactccacttccggaaactgcttccgccgtcgttaatgttcttgctcttgatttctcagataagatcgttcctaaatacgcgggctttctcattctaacattgctgaatcgtagagcttgtccaatccggttagctactggatttccagtttcgagtggtggaaaattcggcggcgccgtacggtggtggatcggaagagacaccagttccatggcgactcagtaccgtaaaatctgactaactggtaaaggacttatggtttctgataatgtttactgtgacgtggcaaaatttcaaccgttcgtttctacttcaatcgaaatctcagatatatgggcttacagattaggaaataacatgggcttatcagtaattgttaaaaagcccataaagccatcaattattaacatttacatctttttttgacaaattacttttctttttttatgggccatctctctcacataagccacaaactcccaacacatgtaaagagcaagttactgttctaatggaaaaaatgcacagcttgaggattacgttaagagttttgatgaacaccatatatatggttcccacgtagtgaaagatttcattatttgtgactctaacgttgtagaaaccaatgagaaaataaagaacggtgaaagaaaatctatagatacaaatgcagtgttattgaatcatggagtctttgaatagtctcacgtggttacaaatgttagtggaaaaaatgggattggattggtggtgacatggacatgtgtggggtttcattatccaccatatatatcctttgcacgcttttggatcctacagagagacgtacgaaactacgaatacgtatatacgcgtatacgtgatacgtgtgtatcagtgtatgtatatgtattataggcgcgttatatatccatgtatgtatacaccatcgtatacatgcatattccatccgttcacgttttcattcaaagccttagatcgtgaatacaattgcatatagagaacgttgaatgattaattattagcaagaattttaaatacggtgttatatattggaaattatgcacaatccatgctagattagatgcatcatgcatggatcaaccattctatatttttcgaatacaatcaaacacaaaacaaatccgttaagttacgtatagctataataattgttctttacaataatcatattttatacgatgaatttatatatacatatatatatatataatttgtgttgattatgataaaaatatatataatttattttttagattttgagtagagatatacggtttaattacagataaactgtggtacggttctaataataataaaatatatacagtatatagaaaatttcgttgttattggaatcgcattacactatgcagttgaatttccattcaaaaccttagtttgctagaaagtgactatttgtttatgcatcgtaataagaaaaacaagtgggcgatgcgctcataaaacaagtatttaataaaataatgaaaatcttaacttattgacgcatgttgagtcaaagcttggcagatctgatctccgagagcttctaagcaacttcgactaagatgttctcctttaggaaaactcccaataacttgattaatcatatattggtggttcttctaacttaacataaactattgttaatttgaatatcattatattgttatttttattatactcttataaaatacaacgctagctgcgtaatcgttggactcttgtagtgaaaaccagttttgtttaatgactacttgcttgagattcgataagatttaaagtgttatctcgagattgatgcttatgtgagattattttgattactttaatacttatacgcatatctccgttacaagctattgtaattgtatccaagaaaattattataaacatgcgaaataattcaaaatttctcaaaaatataaaaagagatactcgaccttgtaaaaatacgacgcgttagtcattttttttttttggattcacgagaatattcaataaacttgactccgactacttcaacttaactatttgaactgtatatatataataataataagttagcaacgagtaatcaaattatttacccaccaaactacaattgtttattcaaatggtatatacaactataaggacattttgtattgtgggcttaatttgattgctaaaatcatttgccaagagtttcttctactattaaacgacgatgacaagcatatcacgggtcttattgaaagtttataacaaatatacatattcatagatatcttatatcacaaactgatatatagtaatataaaagtttggtactaacactttgttaggaaaagcaaacgagtttacatcaaaatattatattcctaacttgttgaagtggccaattcaattcaaagaagcaaaatattttgattttttgatatattaagtaaaaagagaggaggagagtaaggagaaacgtgaccaatgtagcgtagagagtagctagcccccttctactcctagtggatatcttctcattttggccgaacattttaaataatgtcaaatacacacctaactgagttgattggatcatagtggctatggaccaactcacaaaagatatatatcttatgtcacatgacaaattaaataaaagaaaattttgatatgcgaatatcaaatacacaaatacttcattcggtttagactaataatattttgttaacaatgttgtttatgattaatatgtaatgacttaataagagatatagctcttaggtataactaagaaaaatgtaaaattaatcttataatagaattcaaggatcaatcttatttgtaaaagcataactataatataagcttcgttacctttttattcatgcgaaagtgtcaaaccgatatttaatgaaaatggatgtaatattaatttaaatagctatcggcactcttaaaaatcgtttttgatagtattagatatatatatatatatatatatatatatatatatatatatatatatatatatatatatactattagataactatatgtgtgactcacattgtacaacgaacagaggcgatacttgaaaacagttttcttcaaaccaacaccggcggttctctcctccgaccggcgctggcctctccggcgtcggtagattctatgttttctcttttccatttttttattttgttattgttgttgttaggttttatgcaataactcgagaatgatagcgatgatgatgaaatcgtgttcgtcattacgttagaatggtgttttactgttttccggtgaatctattgtggtttcttatgttgttacactatttctatgtcggttcgtgttctcggaatgtatgtttagtcaccggcggtttcgattcaaccgttgttttgctatgtccggcgattgcctcgtgaatcttttggctttgttagtcgtgtgtttggtcatactaacatctgatgttagttatgcgatagttcccgggcgtcagtatgatctactatgggcgttccgaagtttaacacaaatcctatcagatttgatatgtcaccatcgaccggcacggaaaccaccatggaggcaatatgttgaggaggagttggaggctaataggagaatcagaagatggtttataccatatcaacaaaaatggggtttaagaaaaaccaagattaatgacatctctttctatatgagagtttcgatcaattcgaaggttttgcgatgtaacagatggatcgctgcctatgattttcgtatgcgttaccggtatttcatctataaaaagaagatgattcccaagcaagaaagtcacaccaaattgacggaaatgatgaagacgattaagtatttgattaagtatttgattaagaaagcagagcgtaatttactttatcgtttcttcattacataaactattgattatatctgtaatctcattgatacttttgtatacaatgattcatattaatgaaatatttttagatgaaaaaagaaaaaaaagatacatatatatatgtgtatatatatacatattttaaatacaaatgttatatttttcgaaattgtttatcggtttgcatatatagtcactcctaaattacattctttaattgtcgcagtaaaatattagttcatataaaagatacttactgggaagattcatgcgacctacatcttccggattcatgcaaatgttaagaaaggaacaacttggttttgttaaatgtttcatatatcatttttaaatttgccgcctttaatttagttctaaccattgaggaaaatctaacaactataggtaaaatgttatttacttatgccaaaatgtttacgaaaaaagttatcggggtcccctaaagacccttttcgttctaataatttaagcgtttcatgtcaagcacatgaacctctcctaacgtgtttatattatactattatatctagtgtttatcactttccaaagttagaatcgaaagaaacaaaaccttaatgtaaattcattgtaagtttttgttttaagagtttttttttataacttttacacgttttgtgatctcctagctcaatgagcaatatagtttcacaattgcaaatcagagatcaatgaaatttttagttcttctatttttgtttttataaaactgtgcagtttagtgattccattagcaatagaaaaagttaagtaagttccacatcagacggtgattatctgctgatctagtctctttcattgaatagttttttttcctcacgatcgtcccgttggacccatattccccagtcacatcatgttgtccttaatacggtaatgtatcaacaattatgaagacttttgggaatttaaagcaaatatttctagtcaattcataatgttagttttacatcgttgctttaactcaaagcaatgctgtaaatacgttccttctcgattgaacctgactaaccggtgttttattaagaaaattagtttagaagacgaccatattgaattaaacgatcaataattttcgagcgagttgtttcttggattttttttcttttcttttaatatttatcaataaacgtatgactttgacttgtagtcttgtaccattgaatttgacttaagctattataatatactatattcatctcatattgtaattaatcaaagagacagaaatttctaagtaatttttgtgaagaaataagccaggtgattttcaaaagaatgaatagtaattaatgtttaggaagctgaatcgtagcaatatgtgcacgacctaatgttttaacaaatttgtcaagagtttttgatttagacttaagtaccaatagatctacagtttcaattggatgaattaattgtaagtttgtaaccatgacgttcttttctcacaacactcgcatgccacatgtataagttggtgatgaacaatgtccaatggggaatggggattagccaagtttgtccagcattataagctgaaggattggcttacaattcttaaaatttggtgttggttggtcctgaatgtagactcttgtttcaaaacaaaaaatctactgcagaaattttgaaaatgtgcatgaaacttaaaaagaaaataaacaaacccacatattattggctttagcttaaatggaaaaaaaattgaataattggaccgagaaaatttaacaaaacttaataaaaatcaaacttatataattgaaaacaaagttaaaagactttatattttcaaagtctcgtaccaatcacccctaactttgagaaaaatgaaaattatgatctatctatcaatccggtctaaataatgagaacctaagctgtctcaatcaataaatcttcaaaagctattcctctgggaaaagatttagctgagaaataaaaattctatcactttcccttggcctaaaaaagtttgccactttctttcccacaagttccttttttcaattagaaaattgatgttcttggcactgaagaaaatggccaaaagaaaaacccacaaggcacacacacaagcttctcacaatataagaaagagagagaaagcacacacagtagagagagaaggcatgccttgtcggccattagaacttcaagccaaagcaaaaaccttacttatcctttctccataaaatcaaaatccttattggaatatacactaattgattctcctcatcactatctctctctcttcactttttctttccttttctagtttctctcttttaattcttgggattgtggagctttaaagttcctttttttgaaccttttgagtttctgattctgcttgattccagatcataaccatgatctttgttgattccagaactttagctttttgatttcattctatcaaatcactgaaattttcatttgaggaatcagaagagtaagtttttgcgatactctcatttgtcctcagctgcacaaagtaagaaatcttaaagctttgacattttttgaaaactttagttcgtttcgtaaaggttccatttttttgtttcgtgcagctataacttccgataagattgatcagttttgacctttgtgcttggtggtttcttctatggattcacattggtaagcttcttcgttattcattctctagtttccattcatttgaaatgaactgaaatttgaatcctgaaaccaaattaatcagaaccaatgctagatctaaggcttcgttgcttaaagctctgagttttgcattatattgtctctgttaaattgaaaagatttgattttttttaaaactttggtgtgaaaagaaatgtgaatctctctataattgcaggtgttgagggattatatagtgtttctctttgttgagaggatcaatgggttggtggatctttgagtttaagaaagaatcaaaatctatgtttgttggggttttgtttctcttgactcttctggtttggacttcagagagtttgaatagtgatggtcagtttctcttggagttgaagaacagaggatttcaagattcgttgaaccgtttacataattggaacggcattgacgagacgccgtgtaattggataggtgtgaattgcagctcacaaggcagtagtagtagtagtaatagtctggtggtgacatctcttgatttgagttctatgaatctctctgggatagtaagtcctagcattggtggtttagttaacttggtctatcttaacctcgcgtacaacgcgttaaccggagatattcctcgggagattggaaactgttcgaagctggaggttatgtttttgaacaataaccagtttggtggttccattccagtcgagatcaacaagttatcgcagttgagaagtttcaacatttgcaataacaagctttcaggtcctttgccagaagagattggtgatttatacaatctagaagagcttgtggcttatactaataacttgaccggtccattgcctcgttctttaggaaatctcaacaagttgacgacatttcgagcagggcagaacgatttctcggggaatatacctactgaaattggtaaatgtcttaacttgaagttgctcggtcttgctcagaatttcatttctggagagcttcccaaggaaattgggatgcttgttaaacttcaggaggtgattctgtggcagaacaagttttcagggtttattccgaaagatattgggaatttaacaagtcttgagactcttgctttgtacggtaactcattggttggacctataccatcagagattggtaacatgaagtccttgaagaagctctatctttaccaaaaccagttgaatgggactatcccaaaggagcttggaaagctttccaaagtaatggaaatcgatttctcggagaatttgttgagtggggagattccagttgagctgagcaagatcagtgagttgaggctgctctatttgtttcagaacaagttaactggaatcataccaaatgagctcagtaagttgaggaatttggcgaaactcgatctctccatcaactccttaaccggtcctattccaccgggtttccagaatcttacgtctatgcgccaacttcagcttttccacaattccctcagtggtgtaatccctcaaggtcttggtttgtacagtcctctatgggttgttgacttctcagaaaaccaactttcaggaaaaataccgccttttatctgtcaacagtctaatctcattctgttgaatctcgggtctaacaggatatttggaaatattccaccaggtgtattgcgctgcaaatctctgctgcagcttcgtgttgttggaaaccgactcactggtcagtttccgactgagttatgcaagcttgtcaacctttctgctattgagttggatcaaaaccggtttagcggaccactacctcctgagataggcacgtgtcagaagctgcaaagacttcatcttgcagctaaccaattttcctctaatctacccaacgaaatcagtaaactctccaacctggtaacatttaacgtttcctcaaactctctcactggaccaatcccctctgaaatagccaactgtaaaatgcttcaacgacttgacttgagccggaacagtttcatcggttctttacctcccgagcttggaagccttcatcagctcgagatactcagactctcagaaaatagattctctggcaacataccgtttaccattggaaaccttacccatctaactgagctgcagatgggaggaaacttgttttcaggaagtataccgcctcaactcggtttactctcgagtctgcagattgcaatgaacctgagctacaatgatttcagtggtgaaatacctcccgagatcgggaatcttcatctgctaatgtacctatctctgaacaacaaccatctcagcggcgaaatcccgaccacattcgagaacttatccagtttactcgggtgcaacttttcctacaacaacctcaccggacagcttccacatacgcagatctttcaaaacatgactctaaccagttttctcggaaacaaaggactctgtggcggccatttgagaagctgtgaccctagccactcctcttggcctcacatttcatctctaaaagcgggttctgctcggagggggagaatcatcatcatcgtgtcttcagtcattggcggtatctctcttttactaatcgcgattgtcgttcatttcctaagaaatcccgtggaaccaacggctccttatgtgcacgacaaggaacccttttttcaagaatccgacatttactttgtcccgaaagaacgattcacagtcaaagacattttggaagcaacaaaaggcttccacgatagctacattgtcggtagaggcgcttgcgggaccgtttacaaagcagttatgccttcaggtaaaacaatagcagttaaaaaactcgaatccaacagagaaggcaacaacaacaacagcaacaacactgataacagtttccgcgccgagattctaacactaggcaaaatccgtcacaggaacattgtcaggctatacagtttctgttaccaccaaggatcaaactcgaacctcttgctctacgaatacatgtctcggggaagccttggcgagttacttcacggcgggaaatcacatagcatggattggccaactcggtttgctatcgcactcggtgcagcggaaggtctcgcttacttacatcatgattgtaaaccaagaatcattcaccgtgacatcaaatcgaataacattctcatcgatgagaatttcgaagcccatgttggagatttcgggttagcaaaagtcatcgacatgccactatcaaaatccgtctcagccgttgctggatcctacggttacatcgctcccggtaagtttgtaaaaaaccgttaaactttcgagtttacactaacttaaagctaaccgttttttaactgttttttttttgttgcagagtatgcatacacaatgaaagtaacagagaaatgcgatatctacagctttggagttgttcttcttgaattgttaaccgggaaagctccggttcagccgctagagcaaggcggagatcttgccacgtggacaagaaaccatatcagagatcattcgttaacatctgaaatccttgatccttatctaacaaaggtagaggacgatgtgattctcaatcatatgatcacagtgacgaaaattgccgtgctctgtacgaaatcttcgccgtctgatcgaccgacgatgagagaagtagtgttgatgcttatagagtccggtgaacgtgccggaaaagtaattgtgtctacaacgtgcagtgatttacctccaccggcgccgccgtgaaaaaagttctttttataacttactttttctttctccgaaattgattatgtatagattaatatgatttgtatagtcattatagaagaaagagatttttttttttttttgtcatcatcatattgaattatattgaagaagtataatcacaatgtaaagcaaaacttattacacggggaacccagaaatgattagcaaataaaaattgatgttgtagtggtgttcttgcgaggatgtcagctggtttgttgttctgcctgttggtccattgaaattgtgtctgctcaaacttcgatgcccaccatagtatgtctcgaatccagttaaaggctccaaaatgcatctttaatccgtttataagatcaaacatctccttgttgtcaccttcaaaacagatgcgtcgatatcctttactccaacaatgttgcatggccattagcaatgcttgaaattcacactctagagcattatctatgcagttaccaatggcctgtcccgcaaactcatatctcccgttgtggtcccgaacaatccatcctcctttgcctggtatgtttccattaataaatgagccatctacattgcacttgacccacccatttgttggacgcctccaattagggatatgacttcgaattgttgtaccatggctgttgatgtgtgatggtgtgacagcttcattccactcctgaagatccatttgagcaagctgtaacgtagtctcccatggaacatgtcgtcgctgaaaatacaagatatttctgctattccaaagtctccaaagaatccataaaggtagttgatggaaccgctgtgtttgtgttgtgtttgccaattggaaaatgccttgcatcttgtcttctaacgtggaatttgaatccgtaatgatgttgcttggaagaaagagatttatctgaggaaaaaatcattcatataaatcattcatcgtgcaaattggaataaaattactgtacataagtttgttcttagaatcttaataacacaaaagacaagaaaaatggatgattcaaaatgtaagttttaaaagctaaagatgattcgtcaacgttaagctacacatataatttttttataaataatataatttaaataaaatgaattgatgaataataattacaagatgttttttcccataacagaaaatgtataaatgaattaaaaaaggtcggtcataatcgaaattggaccaactcttttttgcttttcctaaaatgatgcttatataccgcagcaaccattcacatcccaaattttttgaaattatttggatgtttattaggttttagtagcctcagtattgaatcgaaacaaacgctaataaaatcctagacctaaaaatttatataaaatctataaatcgaacagtctaataaagatcaaaccctgcaatttgcaggaacaatcttgccacgaatcgaaccaccaacgttctcacacaaagccgtgactaaaccgtcacgtccaacgtagtgcaagttgatatttgagagctcaacgtcttgacaaggaaacgttttactacattgcatcttcaaagcctctttgcttgtggaagttccccaaatattgttatacttgacgtcttttatctgaacatgagaagcatactttccaggactatcacattgcccgtgtggacaatactgctgatcaatgacgatagggtttccaacattgatcatttggatgttctcgtacaagaaattcgaaaccgaaatctgcgatacggacttagcccatgtcttgatacgtaaaccgtctgtggtaccgttgataatcgagtttctgacggttaagccctggacgttcttctcctctttatatctcccgagactcccgacactaataccatgccctggtccgcatctgttgttgggagatatcaaaacatcatatcatataataatagacataaatattcgagaatattattatatcttatagtttacatatagtaaaccagtaaataaaatgaagaataaatataagtattattctcaatttttaccagttatctaaaataaagaaaaatattacagctcattcaaagtttgttaagaaagaaaaagttaaggaaacaaatcacctactaaagaggaaaagaataaactaaatgttcctctatttgttattttcaattcaaaaccttcatcattatttctttagttaatttcaaagtaacattttgcacagctagtgagattgagtcaagagttatatttacctgacatcagagatatccaaattgctggttccgtcaaggattgcgatacaatcgtcaccggttccgatagtgacgttgtagatttgcatatggctagatttcccgatcttgattccgtcggtattagggctatctccgggagcagtgatggtaactccggtaatgttaaaatcctcaacggagaataagttgaaatgccccattttgctattgatggaccttagaccgttgatcttcgatgatttaacaaaagcaaacccaatgttcatagctagtgtacgacaattagtgtttttgttacaatcattgagaggccaagaataagatccttgaccgtcaagtaatccaccgccagtaacagtgagattatcgacgtacttgaaaagtatccattcttcttggttgatggcgtaaggattacgaggagccaataaagttcctctgataaaaaaagttatagagcttttgcaaggaccagagaatgttacttgacggagatagaatattccggaaggaatatagaccgttgatcttccgtaactccattggcaagcttcgttccacgcctttgtaaacgcaaaagcgttatctctttggctatctgcgcgagcaccatagtttctgacgtcaaagatttttggttggccgggatattccttcgtggaagcggcgaggaagaagaagagagaaggcacacacaaaatcagaagaaccctagacgccattctctcttctttggtttggtaacccttttttggttgaaggaaaataaagcgtttaggcttcttatttatagagttacaagataagaatatatgtatttatttaacaaatatgggaaacgcaatctttactatcacccatatggaaaatacttaggaataatattatgaaaggatccttttaagatggaataagatgattttatgtacatatatactactaataaattatgaaataaatgtaggattcattctttttctacttctttttgcatatccgcttgaatctatataaatctgtataagttggaatgttttgactgtatattgtgtcacattacattatacattacagttccacgtggtattttttatgatttattaaatttgtatgtgttaaataaatttatacttcattcatatagataagaaatgtatactttacagtttacatgtgtatttgttattaaaaaaagataatataaaagaataagatatgggaatgtttaccctaaaatcatatataagagattcaattatctttttatctcatttaattttgagtcaggaaaaaatatatatacagagaagaaacaaaattattaaaaatgtaaaatttattggttaacattttgtctttacaaaaaacatagatatgttaatataacgaatatagtaaatgatagaataaagatatttagtatggttaagtaagaaaattaacattttcaataatttcgtctcttctttgcataggatttgtttgccaactcaaagtatattagataaaaagataagattgaaaactaaagttgataagatattatattgtttcacaaaaattagacattggatagatgtttaagattaaataatcttgttagaaataaaactgaagtctatgatgttgcatgtaagagctaatacagtaaaataaaattataaattaataacatggggaataaaatattttattgatttatataagtgttaatttttagatgtagtaaaaatattgaaaatgactttttcacaaaaattaaaacaaattcaaagaaaaacaaataacatttttatccaattacgttatatattatattcgtccaactttgaaccggaaaagtttattaatttacaatgattattaaattgacaagtattaatatatagatgtttcactctaataggttaaatggacaactatatgcgaaaatattagggcgatattacaataatcacaatgtaaagatagacaagcacaatgtaaagctgatcacgtacagttttgtttcttcctcttcaatgttaatctctccattcagttagagttaatttctagtctgatacataacaaaactacaaagtttctcgagtttttttgttatttgataactctctacacgatctaatttcaatattacatgtcggaaaacttccggaaagtaccacacaaatgtttgtaagattgagtaaaattgagtaaagagagctttaatctcccatatttgcaagtcgatataaatttggtatcacggcgtgtaagagatcttgacatgctaaccttacgcagatgtgcattgttgcagtgccatattgtcattattggtaatatatatgcctaagtaaagttcatattgataaaaattttattcaaacactattgcatctgcttgtcaatcgcataataacattattaattgaaaatgtagttttcactattatacaatatccgttcttatttcgtttaaaccggccgagcccatagtattgcaaactatcacaccatatgggctttaactttacgttggtaaaacgtaaaaagaaaatagcgatcaagtctcaagaagggtacttttagaattaatagcaactttaaggcgtaaatagaagtaatacaaatagttggggttattatgtaaatatgaagaagattaagatccagaagatggaaatgaaaaacacggcacgcatttcaaagcccaaaacgggcgggggcaaacgtcacgcctaatcttatcttcttctatcacactctcagcttatctatgactatgactctcatcatcaattatttcacactattaacaatcaccaaaccagtgtgaacattttaattcataattagagtaaggtcattaggctaaaaactgtttgatttggattttacaactataggataagaacttgtatcgctgtcacagatgatattttttggtcgtttaagcaaagaaatattacgaaaaagagatattttttattcttacttattttgggattatcatttacccggaacgggcaaagcggtgagtcatcttaccttataaatgatcacaaacccgaggactgtgagttttcgtgtagaacaaatccttctctgagaaaaaacaacagatccgaattttatctttaatcagccggaaaaaatggagaaagcgatcgagagacaacgcgttcttcttgagcatctccgaccttcttcttcttcttcgcacaattacgaggcttctctatctgtaagcattctatcaccacacactctctctctctcgatctatcgcgatcttttggttgtcttctcttgtgtttgcagtctggggattatggatcgttgttgatctggattcattatatggaattttcgattttgattttgatgctgaattataatttgattcgaggcgtgcctgtgagctgaaaattttaagtttcagctcgattgagatcaaattcaagacttggattttgtttttgtatttcgttcactggattgagatagatatcttttttttttttgttgttgtttgatttttgttcgattgggttgaattatccgtgctctgcatgtactgatgatttcttaaaagtcaaagcttgatttcaattactacgtgtgatctctttaacgtgttctttccaaattcccaggcttctgcttgcttggctggggacagtgctgcatatcagaggacctctctctatggagatgatgttgtcattgtcgcgtaagtcccatctcttatgcttttactcttttggtatttggtttttcagcaacgtatgaagatttctcgtctctttctgatagacttacacttattgatccattgcagggcacataggactccactatgcaagtccaaacgtggcaatttcaaggatacatatcccgatgatttgctcgcacctgttttgagggtctgtcgctatcttttctattctgttgttggtttttatttcctttctacgtctatttatagatagttcttccttgacataggcattgatagagaagacgaatctaaacccaagtgaagtaggtgacattgttgtgggtactgttttggcacctggatctcagagagccagtgaatgcaggatggctgcgttctatgctggtttccctggtatgtttcttctatgtacagtacaatacaatggtgaaaagtctttgtttttatttcctgtatgctcatcctgttatgttcatttgcagaaaccgtggctgtcagaactgtgaatagacagtgctcatctgggcttcaggctgttgctgatgtagccgctgccattaaagcgggattttatgacattggttagtgaataaccgtctttaactacgccacattttttcatagagaaccgagctgacgatatgatggatgcaggtatcggggctggtttggagtccatgactaccaatccaatggcatgggaagggtcagtcaacccagcggtactgattctctcttatctggagtcttacttggctctgttattttaatacgtactataatacggactatgttatttcaggtgaagaagtttgcacaagcgcagaattgtcttcttcctatgggtgttacgtcagaaaatgtagcacaacgctttggtgtctcaaggcaggagcaagatcaagctgctgtaagggaactgaactttttcagtatggttgtattttaaataacctataactttgatcgctatgctaagctatggagtcatattgctaggttgactcgcacagaaaggcagctgctgctactgctgctggtaaattcaaggatgagatcattcctgttaagaccaaggtatttttcagatccttcatacaataactgtaacatttaagacttctcttggtggattagttactgaacttcattcatgttctagtattagtcaataacgtgtgttttaaatttcagcttgttgacccgaagactggtgatgagaaacccattacagtttctgttgatgatggtatccgaccaaccacaactcttgcttctcttgggaagctgaagccagtgtttaagaaggatggcaccactactgctggtacttttcccgaatcaattgtttcattatggaaaccacagttcttattatcacaattttaaatccattgcttcatttgttctgtcgcaaacaggaaattccagccaagtaagtgatggtgcaggagcggttctcctaatgaagagaagtgttgcaatgcaaaaaggacttcccgttcttggtgtattcaggtgggtaataattacttacaaagctacgactgtggaagtctgaaaaccgaaaaaactgcagaggcttgtgatttccatttacacagatatgctagtatacgtggaaaatacattgttctttctgtatttggctttttctaagtagcacactattggacatattgcaggacatttgctgcagttggtgttgaccctgcaatcatgggtatcggtccagcagttgccattcctgctgcagttaaggcggctggtttagaacttgatgacatcgacttgtttgagatcaatgaggtatatagcaaacaatttcatgatcttcttatcacatatctcttcccgcacattctgatgatgaccatctgtttgaatccttgtgtgttcaggcatttgcatctcagtttgtttattgccgtaacaaattgggacttgacccagagaaaatcaatgtcaacggaggtgcaatggccataggccatcctttgggcgctacaggtatatctgttaagaacaggactaaaactgttaagcttgttccaatttaccaaaccatagagacttgaattaatgagaatctctcaactctcaaccaaaccttaagaaatccacagccgagatatatctttataaactctgtcctcactaatggttctttaaccaacttacaagagctctatcttgccgcagtccgtccttttcaaagcatatcaatgtctacattgtgtctatataattataaaacgctcatgaacagttgctaatacttgttaaaactctcacaggagcgcgttgtgttgctacattgttgcacgagatgaaacgccgtggtaaagactgccgttttggagtagtgtcaatgtgcattggtatgcttctcactcgaataattcattgtgaatttggtgtctgaaatatgtgtctgagggatggttttactgatttggtaaactctggcagggacggggatgggtgcagcagctgtgtttgagagaggagatggagttgatgagcttcgcaacgcaaggaaagttgaagcgcaaggtcttttgtccaaggacgctcgctagagaggaccatgcaccaaaaccgtttttcacctcacctctctcttttctggtcttcttgtcactttcttcagatattattatagtttcgaataaagcacacaaccaatgtttgcctgagtcttgtgttgttcttgaccaggtcatgtgtttagtattttttttaagtgaagggggataatctttaaatcttttatatgtaagaatattgttcttctcgaatttcatcagttgttgcttctagaaattttagattttttgggtggcagccatttctatatttcgatggataagtcaaacgttcataaagtcaagggttctgccttttgtttgtgtttcatgattttaccttgaatttcattaactaaaacagtgttaatagtaacagttggggtggtggcgcagttggctagcgcgtaggtctcatagctactgagtgatcctgaggtcgagagttcgagcctctctcaccccataattttattttctcatagctatttatataacgttccttctagtatttttttttcttttcgttatagtatcttgtctttgataccggagacgttataacggcagtataagacgttataatcatgttccaatgcatcccctcagttttgtgttaaaaacgagccatcaatgttatcatatatggaaatcattattgaggctttgaccaattaattatgcgaattgaccgactttgatcactatacagagcaaaacaaatccactgaatcatttatttgtgtaggttcatcttttttgggcaccgtattcatttcttattccatgaatttgacggagtaattttgattttctttttcgagtaagaatctggtcaaatattcgatgaacctctacaaaaaaaattaacctctataaaagtgtagattaaccaagtgtttcatcacaaaccatttcaacgtaaacgaaacaacaactactactctcaactttacactctcttgataagtctcgatgatgaataacatgaagctcttgatcatcgctgtgatgatcatctcggcagctttgcttccagcgcttgtggtcggatctcgtccggtaaaatgtgacaattgcatggacggtggagaaaaagaagagatcatgaagatgagttcaggtgtagatgtgagccataggatacttcaagctaagagatttatagattacgaagcattgaagaaaaacttaccagccaaaccagatggtaaaccggataaaccggataacaaataccgacgtggttgcagtgccgctacaggatgttaccgctttacaaattaaacataaaccacctctctcttcttcttcttcttcctttcgttggtgtgttttattttatttttaattagtatttccaatcacatttcttattattatattttattgcaatttgtaagcctttgaggcattatctcctagagagttagaataaacttcgtttagaaattgtcatccttttctcaccaaatgattgacgagtgaaaattgatctcatcgtaaagtatttttgcggtcaagttcaaacaaattgatcccttctctcgcaccatattcttgttttattttatttaaacgatcgatatatttccaaaccattcctccaaaactatcacacattcacacctaccaatttcaactttaaatacaaaatatagtcttgttgtaaatataagatacactttagaagtgtacacgtgaaattcaggtatatatattacaatagtaagcaacctctaagtacaattaaatcaagaaaaaaatagatttgaattaataggagcggacatgggatgcatgtagaattgtagattatcatttattatggtgactagaccattgaactttcctataactttgaaaatattcttatttagtcatttaatttagattacaccaaaaccccaaatatgccaaattttctacaaataccccaaaaaagacaatttataaaattattatccaaccacatgtaataatctttgatgacttttaagttttaaattttaatagtagatttagataatataggaaccaattattcaaaggtcaaagttcaaactagcttatccaaattcattttcgctgataaaaatacgttgaaactatcaaataacaaaataccattacaccaacatcaccaactttttaaaaccccacaagttgattatttgaatttgcttttaggtcctcaagttcaagattgtttcaatttgcacaatctgcataaatctttctgaaatataacttttttgccctctaaaactcaagggtttgatttttcttcttcaactacgttaagatttctcctacacttttctttttcaccgtattctcttttagtcctcgattctctacgcgtttcagcgtcaagtcttctagatctctaaagccttcgtgctcgccaatataaatctctgagatcggtcccgtaaaatcggattcgcgtcgtttttgagtaaaaaaaatggcgcaacaatcgttgatctacagtttcgtcgctcgtggtaccgttatcctcgttgagttcacagatttcaaaggcaatttcacatcaatcgctgctcagtgccttcagaagcttccttcttctaacaacaagtttacctacaactgcgatggtcacacgttcaattacctcgtcgaaaatggattcagtgagtcaaaatattgctcgatctgtaagcgtagcttgtttgtgttttgatttatccattgtttgaattagattttttgcctaattgagaaatatgaatcgagttcttatgtttggtatagtttccagtaataattatgtattggcgttgataattaattgatgttagatctatggtaatcagtgatatttttggtggatctatcaatgaatatttgcaatttttgttctggatctattgattctttgcttatttgcgtgtagctttcgatatcatgaagtttttggcattagtgtattgtgttctttatgtaactctgttttactaaacctaattgggttttgggtgatgttgatggcggatatggtctctttatgatagtgttaactttcttatcagcgatatattgatgaatctattgctttatctcttaatatagagtttaaaatggaccggttttgttttcgtttgtgcagcctattgtgttgttgcagttgattctgctgggaggcagattcctatggctttcttggaacgagttaaggaggatttcaacaagagatatggtggtggaaaggctgcaactgctcaagcaaacagcttgaataaagaatttgggtatgtgttttttgatctctttgattggtattgaaaagggtctatgattcatgggcatagttattgatggacttctttttggcttctctaaaggtcgaaactgaaagagcatatgcagtattgcatggatcatcctgatgagattagcaagcttgctaaggttaaagctcaagtgtctgaagttaaaggtgttatgatggaaaacattgagaaggtttgattctgacccttttttctttttatcgatatagttttatgttgtaaaccttttcgaacagagttcagcttgtatgactttagtaccaggatcttatgattcgtaaagcataaactgtagagaggaatgttttattctcggttgtgaagacatattctgttgttaactcgtttatgcattcgtttgcaggttcttgaccgtggtgagaagattgagcttttggttgacaaaacagaaaaccttcgctcacaggtttgttttctaaatggttcaaagtcaatagacccacacagagacatgcaagagtttgcagctttctcttactgattgttgtttcttgggtttctaactttaaatttgaactcgactttatcacaggcgcaagattttagaacacaaggaactcaaatgagaagaaagatgtggtttcagaacatgaagataaagctcattgtccttgcaattatcattgccttgattctcatcatcatcctctcaatttgtgggggattcaactgcggtaaataagtctggaacatttcttcccggcgttatcgactgcgctctgtgcttcccaagatctctgagaatatcttcattcagttcgttgtgctacctttttgttttgtttttgtttttgtgatttctatattctcatactatatgtttcttcttagattgtacttcttgaaatttgttttgtataggctatatatattatacatatatgtatgcatgttcgacaatctgcaatgttgctattgctggtactgacactaattcttgcaaaccaatatttggacgatacttgttcttggcaatttactaatttctttggtctgttgatgagactctagttgcggattgcagtgaggtataagcatagtccacagccggttaatattaaatggagatgaatatgtaattaacacggtttcgtctgaccgattcaccagagtctccggttagttcattaagggtttgctcaaacgctttctcctctgcttccctaatttcggaaacattcgcctgattttctgagattttggaatttcttcgaattgattgccatgctgagctcaagatttcgactgctgaaatcgaggcgacttgcggagccacctccggctgatgtcgcggttatgtgtatttgcaggaaatgaaagtgatctccttattgcggcaaatcagccacttcctgtcgactaaaactgtggtgcagcatgtaagaacaaatgcaagttcggacaaacgtgttgtcttggtcagtggttttacttggcttagtcttcgattctctacgcgtttcagcgtcaagttttctagatctctaaagctttcgtgctcgccgatataaatctctaatatcggtcccgtaagatcgaattagattcgcgtcgttttttaaggaaccaaaataatggcgcaacaatcgttgttctacagtttcatcgctcgcggcaccgtaatcctcgtcgagttcacagatttcaaaggcaatttcacatctgtcgctgctcagtaccttgagaatcttccttcctcgaacaacaagtttacctacaactgcgatggtcatacgttcaacgacctcgtcgaaaatggattcagtgagtcaaaatattgctcgtgatgtgtttgtgattgtgttttcgattagtcgatttattcattgtttggattagatttctttttacctaattgagcatttgagaatcgagttcttatgtttggtatatctctatgacttatctgagtcgagttcttatgtgtttaccgtttggtataatttcaggaatagttatgtattgggtttgataattaattgatgttagatctataatcagtgatatgtttggtggatctatttaagcatctatgcaattcttattatgaatctatgattcttggcttctttgcgtgtagcttttgttttcatgaatttggctggtttttcaaatgagagttgtttgggaaatttgtggatatatatcgctcgagtaaattgcattggtgtattgtgtttattatattgctctgttttaattaaacttagttgggttttgatgacgttggatatggtccatatcatatggactctttattatattttttaagtttcttatgagggatatgtttgtgcagcctattgtgttgttgcagttgattctgctgggagggagattcctatggctttcttggaacgcgtgaaggaggatttttataagagatatggtggtgaaaaggctgcaactgatcaagcaaatagcttgaataaagaatttgggtatgtgttttttgatctatatgattggtattgagaagtttgtattattcatgtcaatgacagactcctttttggctgctctaaaggtcgaatctgaaagagcacatgcagtattgcatggatcatcctgatgagattagcaaccttgctaaagctaaagctcaagtgtctgaagttaaaagtttaatgatggaaaacattgagaaggttcgattctgacccttttttctgttaatggtataattttatgttttaatctatttccagtagagttaagctcgtatgagttaagtgtcatgatcttttggttccttaacctttaaattgatgaggggaatgtccagttctgggttgtataggcatgtatgctgaccgtttttacattgtggaacacattcatttgcaggttcttgcccgtggtgtgatatgtgagatgctgggtagttcagaggttagttctcttaggcatatggttctaagttccatacacatagatatgcttgagttgccagttctctcttactaatgttgtcttgggtttccaacttttaattgaactcgaaactgtcacagtcacagccgcaagctttctatataaaaagaactcaaatgaaaaggaagaagtggtttcagaacatgaagataaaactcattgtccttgcaattatcattgccttgattctcatcatcatcctctcggtttgtgggggattcaactgcggtaaataagtctggaacatttcttcccggcgttatcgactgcgctctgtgcttcccaagatctctgagaatatcttcattcagttcgttgtgctgctttctttttgtggtttctaatttctaatttctgctatgtcctttctacttaggttgtacataaatattatacatatatgtatgtcctttcttctttgaaattggttttgtataggccatatatatgtatgaatgtttttgctattactggtactgacactgattcttgcgaaccaatactgtgacgagatttaaatatgtaattggcaacttacaaattgctctggtctgttgatgtcttaatgaaggctctagttgcgaatttgcagtgatggtgataacggtgtaacatagcctagattggagacgagtctgtttggtctgaccggttcagcagagtctttttttttttttcgtccttcagcagagtctccggttagttcgtttctttcgttgctgccacatcacctcgctcgaacctttctcttctgcttccctaattacggaaacgattcgtctgatttcgattcttctaaacgattagtcggctagccatgttgaagacgacgcgctcaagttctcgactactgaaatcgaaacgacctgcggagacacctccgacgccggtccgaaggcttctggactggaggtgatttggcgtctaaccgatggatagctgcgactgcgatgcattgttaaggaaacagacagagatgagtaatccaaatgcacctgtgacctgctttggtattgtttctgattcccctcctatgtgaaattcaatgcttgttaaattagggaaatttggtaaagctaaacccttggtttctagctttagagtctgatattgtattagagagagtgtttttatgtgtatctttgttatcattttcgatgatttgatctatctagttttctcacaatgttatacacaatcttttaaccattgataagcaaccttcattgagatagagagaggcaaagcacaaagaaaggagatttcagaactcaaaagatttcagttttaagttttccttataatagaaaaggatctattaaccgttgaaattctaaagcttttacatttccttccaaactcattcctctgttttcttattttcctcttttcctaaatcaggtttgtcaaaaaaaaataaaaaaaaatgggttcagtttctctctgaagaaaccaaacgacccaaaacaagataattccataattgtaatggcttcaagtccacccaagaagaccttaaattcacaatcttcttccttaagccggcctccacaagctgtcaagtttggtcgccggacgtccagtggtcgcattgttagcctctcccgtgacgatgacatggacgtctctggtgattactccggccaaaatgattacatcaactacaccgtcctcatgcctccaacacctgacaaccaacctgctggctcctctggctccacctcggagtctaaaggtgatgctaaccgaggtggaggaggaggagacgggcccaagatggggaataagctggagaggagattgtctgtcatgaaatcaaataacaaatcaatgttgttgaggagccagacgggagattttgatcataacaggtggttgtttgaatctaaaggaaaatacggtattggaaacgcgttttggtcagaagaggatgatacctatgatggtggcgttagcaagtccgatttcttagacaagccatggaaacctctcacgaggaaagttcagatcccggccaaaattcttagtccctacaggtgattgtttgttttcacattttaaaacccctcaagattttctgcttcttttattgatgtctattacagaacatcaaaatcttacaattagtccccttgtttcaggttattaatcgtgattcgtcttgtgatagtcttcttcttcctttggtggcgtattacgaaccctaatgaggatgcaatgtggttatggggactatcgatagtctgcgagatttggttcgctttctcttggattcttgacattcttccgaagctaaaccctataaatagagctactgaccttgctgccttgcatgacaagtttgagcagccctctccgtcaaatcccactggtcgctctgatcttcccggtgttgatgtgttcgtttccacggctgaccctgagaaggaaccgcctttagtcactgcaaacacccttctctcgatccttgctgtggattatccaattgagaagctttctgcttacatttctgacgatggtggtgcaattctcacctttgaagctatggctgaagctgttcgttttgctgaggtttcatttccgctttctctccctctgtatcttaactagtctattagatggtggcaaaaatctaaatggttttgaattttgtttgcagtattgggtgccattttgcagaaaacatgatatagagccacggaacccggatagttactttagcattaaaaaggacccaacaaaaaacaagaaaaggcaagatttcgtcaaagatcgtcgttggatcaagcgtgagtatgacgaattcaaggtcaggatcaatggtcttccagaacaaatcaagaaaagagctgaacagttcaacatgagagaagagctcaaggagaagcgaattgcccgagagaaaaatgggggtgtattgccgccagatggggttgaggtggtaaaagcaacgtggatggctgatggtacgcattggccagggacatggtttgaacctaaacctgatcattcaaaaggagatcacgccggaattctacaggtatgaaccatcaacttcattgatttcaagtaaaaccatgaaaacttgtcaaacttgacataatgttttgtagatcatgagcaaagtgcctgatcttgaaccggtgatgggcggaccgaatgaaggcgcgctagatttcacagggattgatattcgtgtacctatgtttgcttatgtctcgcgtgagaaacgtccaggttttgaccacaacaagaaagccggcgctatgaatggtatggttagagcttcagccatattatccaatggcgcgtttatcctcaatctggactgtgatcactacatctacaactccaaagctatcaaagaaggaatgtgtttcatgatggaccgaggtggtgacaggatctgttatattcagtttccacaacggttcgaaggaatcgacccatcagatcgatatgcaaatcacaatactgtcttcttcgatggtgagttgttacattgatttgcaacacagcaaaattgtaatgcttatgttacaagccaccataacttaaacattattccggttctgaaacaggtaacatgagagcattagatgggttacaaggtcctgtctatgttggaacagggtgtatgttccgaaggtatgctctctatggattcaacccacctcgagccaatgagtactcaggcgtgtttggtcaggaaaaggctccagctatgcatgtccggactcagtcccaagcatcccaaacgtcccaagcgtctgatttagagtctgatacacagcctcttaatgatgatccagatcttggtctgcccaaaaagtttggtaattcgaccatgttcacagacactattccagttgcagagtaccaaggacggcctctagcagatcacatgtcggttaaaaacggaagaccacctggtgctttgctcctgccacgacctccccttgatgctccaacagtggctgaagccatcgctgtcatttcttgctggtaacgttttgaaaaaagagatatgctctgttagtataaatggatatgtagttaaaaatgttgagtttatttggcctttcaggtatgaagacaatactgaatggggagatagaatcggatggatttacgggtcggtcacggaagacgtggtgacaggttatcgtatgcataaccgtggttggcggtccgtttactgcatcacaaaacgtgatgctttccgtggcacagctccaatcaatctcactgaccgtctccatcaagttctccgttgggccacaggctctgtagaaatctttttctccaagaacaatgccatgttcgccaccagaaggctcaagtttctccagcgagtcgcctacctcaatgtcgggatctaccctttcacttccatcttcttggtcgtctattgcttcctccctgctctctgtctcttcagcggaaaattcatcgtccagagcctcgatatccacttcctctcctaccttctctgcatcaccgtaaccctaaccctaatctcactcctcgaggtcaaatggtcgggaatcggactggaagaatggtggagaaatgaacagttttggttaatcggaggcacaagcgctcatcttgcagcagtcgttcaaggtttgctcaaagttatagccggaatcgaaatctccttcaccctgacatcgaaagcctcaggagaagacgaagacgacatctttgcggatctttacattgtgaaatggacaggcttattcatcatgccgcttacaatcatcatagtcaaccttgttgcgatagtgattggagcttcgagaacaatatacagtgtgattccgcaatggggcaagttaatgggaggaatattctttagtttatgggtcttgactcatatgtatccgtttgctaaaggattgatgggtcgaagaggaaaggttccaacgattgtttatgtttggtccgggcttgtgtcgattaccgtctcgctgctttggatcaccattagtcctccagatgatgtttcaggcagtggaggaatctcagtgtaaatttggatcagaatgtaaaaactgaggatttttaactctatttttttttgtttgtaaaagtaattttggtttatgtaaatttatgttgaaacagaccaattcttgctgtacttcgtgttagcttttgatacacaccgttgttacatggaacagaaacaaacagttttttttcattagtcccatggcttttataatctctgtttcttcttacagaacagaggatcagattaagagagaacgaaaagagagaattttcaaatatactatatttgacgaaactacccttgttggtcatgaacgttgaatacctgatctgacagatttacccttcgtggaacttgacaagaaaaaaggaaattagtatcagccgacgttgtttcgttgcgtggacctgaaggaagcttcctttaatttccttttttcgtttaagtctccactttttacgctctctatataatatcggacactctacttctctcgttccataattcgataaccaaatttgagagagtgaaaccctaattagataagaatggtagatcacggtatgttctactcctccaggatgagtactctttcttccaacggaagaggcgacgcttatacttgcaaaaaagctcttcacttgactctgaataaacctaatgttgttaaagcatgttcggatttgaagaagaatgaacatcagatatctcgtgattttgcggcagagactaagaaaaagactgagtttttggtgttgaagaagaacaacgatgagagatctaagactggtgaagtaactagagagaagaagcaatcggctctacctctgaaactttctaaaacccctagatctggaacgggagagattaagcaaactttgaagaagcgtggcctttccaagtctgttccagaaacatcgaggctgatcaagttgaagaagcagccgcctgtgaaagtatctgacaaacctaagagttgtcctgtcttgacgaagaacgacacggatacgttggaactgttcgagatcgccaaaaaatctgctgattttgccaacgcaaagggaatactcgcgtctgaagtagagacatcaatgtgtgtagataccctcactctgctcttggagtttcccatcagcgcaagagatatggaaacaaggaagctcatggttaggctagagcatcttacaaaacacaagaaccgaaaaatatgcaattctgcttcaaaacttcttcaatgttggagggagagtatcagagagcaacaactcagagagtcccgtaaaactcaaggctaaaatgtcactagggaattgaaaaggttgtaacttgaaaacgttggttggttgcttattcttttgcttaaagtagagtattgtagtcactaattcaattacattactcaaaccctaacagtgagaggaatatgtatgtattaaggattttcacaatctctcttagctttgtgttattcaagttcagtgtgtatttcttctgtttaggcaatcaatgaaattagagttttgttctgaaaatttgttttcagttgtcgattgtaactgagagacaataagtcaatacttgagagagtttctcatttgcataatggttttccaacataagctcaaagatcttctattaagagaatccatggaactaaaaaagttaagaaatcaacagtaatggttattagttttctatgcatttgtgtctttattcggaaacagccctcctgatatatcgagcggactgtttcaagaggtgatgataaacactattctccattgtcagagcagaactattttcctaaacttacagttatctcggtagcaaaccttcttggggagaccatatggcgtgttcatcatgattcctctgtgagtgaaggaagataaacaatacttcaaatgcaatttttgttttaagagaatatttgggtctaataaagctttttgatattctcagggagcttttgagctattttcctctgctttttcccactcctctgtttcatatttgtatatgacatcaagagatagatatgtacgtgtatgaatgtaactattgaaaattcatcattccaacattaaccataaaagtaactacttcataacaagaccaacaacgacttgacatgcattcaaagatcaaaagcaaaaccgaaacaaaccaattatcttaacaagccaatccggcttgtatgaagcgatgacttgagctatagctaatccaagcaacagtccagtcccatatcctgttgccactgctttccagttcagcacttgctcctgttcttcgtcttcttccttaggttgttgtgttggcggcgcattctttccagagcaagtttcctccaaaggaagaccacaaagccctgcattcccttcaaaggaggatttatgttgcccaataatctgtgttccttgtggttttcacccttgagtttattgtgagatacatttatgtatgccaaaaacgagagggtcttgagtccattaggaatagtcccagagagttggtttcttgacaggtctaatgactcgagctcagtagcattggccaaagacagaggaatatggcatgtaaatgcgttgtttgataaattgagtgcaatgagttccttcaagagaccaatagatttaggaatctgtccttctaatctattcccagaaaaatcaatggcactgtaggagttgaggaccatctgttgctccatggataaccctttgtatttcatatctatagtatccctatacacatacgaatctataccgaatgcattattcttgtataccatatataaatctccatcttcattcaccgtgagtgatgatgttttccagttcacaaagtatcttggtgacaaggttccagtaaacatattatcagctatctcaaatatccgcaactcaggaaacgcgagaggactttgatgaggaggagctataggaccatacaatttgtttgaacttaggataaggacttgcaaatttggtaaagccttgagccagaagggaaatgtgtctttgattctgttgttgtcaacgctaagaaactctagagacgagcagtttaggagagatcttggaagcgtcccagatattagattgaagccaatgtcgagtgtctgaagagagtccccggcacataatgtgtcaggaatacttccttccaaattgttctttcgaagatgcacaaacgtcaaattactcagacattgaggaattttaccggtgaaattgttgtaaggtagagaaagagcagcaagagagcttctgttgcagattgaaagaggtatctctcctgagaaattattataacccgcagagaaggctttgatagagagtggtagattaggaagtgccccttgaatattgtttgaatgcataaataatatctccattgatgaatttactaaaacatctgttgaaccttcgaaaccgttgaaagaattatttgcaagactcattgatcttaggcgaggaagtctccataaccactcagggattttaccattgattctattgttggacatgtctatatactccaacttctgaagggtctttaagatgtttggaaactctatgatgccgcattgctccaatagcaacttctcaagggttagtgggatgtataaatctgaccttaaacttctcggagatatactgttaccggaaagatcgaggtatgttaaagatttgagagaggagaagaggtttaagtcgagtgggtagcttatgtttagaaaagaaagttcaagacgctttaggtttatgagctttgagataggctctaggatttgtccttcaaaaggtttaagcccaaggtaaaggatctcgagcttcgatgaggtagaaacttcaatggaaccggtgaaatggtttccatataaattaagatatgataaaaagggcatcatgaggagagaagaagggacggttccagagaatttattattttcaaagtctagatgggagaggttagttagattttgtacctgtgggaaaccaccagtgagctggttattggaaaggtgcaactcggttagctgacttaggttactaaatgaggaaggaacttggccagtgaagctattaaaggaaagatccaaaacctctactttgttgagattaccaaactcggaagggaatgaagtggaggtgaagttgttgtgagagagattaaggaaacggagctgatgaaaccagaataggctactgttgggattcagagttccactgagacaagcgttgagttgtagcttcgtgaccacacccgtcgagttatcgcaccagactccattagagtggtcactatggttgcaacgatgggtatcaaactcgttcttgaactgtgtaaaggcttgaatctgatgggaacgacaagcaacaagatcaagaacgggataactgaaagtgaataagcttgaagtcgaagaggagacacaacagagtaatagtagcgagagaaaacgcaaacgcagatgtgatcctgacatggttcatggaaactttttaacaaggatgatttagtttaaagaaaagcgagagtcaagattgatataaatataggcatatatagatacgtggttatgcataattggagcacaaattgacttataagaagttatagccgtgaagtctttgtattcgatcgggagtgaagaaaagtatggctaagtgggtcaaggctaggtgccactaaagtcatgaaatgaatccacgttagttgaaattcctaacgtataacttggattggaatcacatcagtttgaaacttctaaaacttacttttcaaaactacaaaaaataaacttaccataacgacaaacccatatacgtttgttgattaattgtgctatctgagtctttaatcattggtataaaactggtgaaaaatacgagtttggtaattgataatgatgttatattccaaaaacatgaactacttgaatcttgatagacatctaaagaccaaatgtaaaacaaaatacgtcgacgtgtcttatcggcaacaaatagcatcatcgagtcatcattcataatcatatatatgggcaacacttgatattttgatgcctcgcgtctttacatgagttataaaggggccatttgccacactttccagattttatgtttgaatactagttttactattagtgattttttttcattccatatatgaacacaaaattatattgtgcattttgttttgttacaatttttctcttctattcaatacgattatcttagaacatatactataaaaaaatacattatgcattttaaaatgataattttagttaattcattataatatatagttctttacattatttatctagtattgttttcctggggcaaattctaaatctgaaacggtgaccatctaccttccaggggtcaataaataccccatgcaatttttccaaaagggatcaatgtaacaatcgttagtttctttctcagcctcaggtaagctgtccccacatatccctccctctttctaattatctgattgtagtttgtataatgttttgttgtattcgtaagacttgatcaacttgcaagcaaaagagatggtgcaaaaggtggaagcaaggggtggtgagataggagatgtatgggatgatggtgcttacgacggtgttagaaaagtatacgtagggcaaggcgaagatggtatagccttcgtcaagtttgagtatgtcaatggttctcaagaggttgttggagatgaacgtgggaagaagactttgctaggagctgaggaggtatactaatatatctatcgatctatgcatgttgagatttgtttattggtttcttcattgagaattctctttgcagtttgaggttgatccggatgactacatcgtatacgtggaaggttatcatgagaaagtttttggggtaacaacaaaagaaatcatctccactcttactttcaagacttataaaggcaaaacttctccgccgtttggaatcgtctcggggacaaagtttgtcctccaaggtggcaaaatcgttgggtttcacggacgttctaccgatgttttgcactcacttggagcctatatatcatcgccggccactcccaaattgcgtggaaagtggattaaggtagtagtaatatcttagatgcatgttaccaataataatcaaaatctaattctcttaagaatatagaactaacaagtgttacttatttataaggtggagcaaaaaggagagggtccagggccaagatgctcacatgacatagcacaggtgggaaacaaaattttctcatttggtggtgagctcacaccaaatcagcccatagacaaacacctttacgtttttgacctcgagaccaggacttggtccatttctccagccaccggagacgttccaaacctctcttgcttaggcgtccgtatggtgtcaattggatcaagcctctatgtctttggaggccgagacgcttcacgcaaatacaacggcttctactcgtttgacacgaccaagaacgagtggaaactgctaactccggtcgaacaaggacccactcctcgtagcttccactcgatgaccgcagatgagaacaacgtttacgttttcggtggagtgagtgctacggttcggctcaagacactagacgcttacaacatcgttgatcacaagtgggtgcagtgttcgaccccgggaggttcgtgtagcgtaagaggaggagccgggctcgaagtggttcaagggaaagtatgggttgtgtatggattcaacggatgtgaagtagatgatgttcattgctacgatccagctcaagacaagtggacacaagtggagacgttcggtgagaagccttgcgctaggagtgtgttcgctagtgcggttgttgggaaacacattttggtctttggaggtgagatagcgatggacccaaaagctcacgaaggtccgggtcaattgagtggtggaacttttgcgttggatacagagacgttgaagtgggagaagctggataagttaggtgaagaggaagagactccgagtatcagaggttggtctgcgtccacgacaggtaccattgatggtaagaaaggactggtgatgtttggtgggaaagctcaaaccaatgatcggtttggtgatctcttcttttatggagttgactctgcataaacgctgttcggtgacggtgatgatgagtgtttgtaaatatgtgtgtgtgatgcaataagggagggtcgtaaatcgtaagactatatgatcctgtatgtttgtttgcatgtttcgtgtacggtgtaccaataaatttcgataaaataaaataaaataaatgaacaacgatgaatgtgtttgaaactaaaccaatttagaccaagactgcatttcgatttatattaaaccggtatatgtatgatttaatgaaccggattgtttggtttaagtcctctcttattatgaaaacaagtcgagaaggagattttatggcgcgataacggcggagtgcgaccaccgtcactctcgtcgagttttggtggaggctttcaaactcaatgagcatcaggtgatttcattttcgtatatcttatcgtcttttcactagcaagaacaaatgctctttccttttctctggggttcgctaattatattcaaatgctgatttagttaagaacaccaaaattagttttgactacagtcatgaaacgaaaccaatcttttgaattgaatttagggttttagcttctcggattgatgttttagggttttattattttggctgtctacttgttgatttttgtgtttcaaagcacactacaagttcagctctcatctgaaaatagatctctcttggtgtgtttccttttatgagaattcatgagattggagtttgatctgttagaaataatttcagttacaattgagagacaatacacttgcgagagttttcatgcgcacactttatttcattgttatctgagaaaattagttcaaactgtgacgcagattgttgtatttggtaagtcctctaatgctacaagtttgtttattcacattaaactgttttgtatcattggtggggggtgccatatgcactccacagagggatctcatgaatgtctagtttgagactgaattcttgaaactggtaatatagtctctgactctcttatgtttacttgatccattttatcttaacaggatgctggaagatgacgtcttgcgttataaagaaagttcagctcgagttatttcaagaattagagaagatccaaaacagtatatcataagcctctttctcaaccaatataccaatacatgcatcaagacattgtcagccaaacagagatcttaattaagggaaccaaaagttacagaaactagcaaaacctctttcttacatcaggtaacaatatatccacatactacatagtctacatttacatatcacttttttgttctacgttcttcttattattaaaactatcccatcttgaatccagagtcataaacaatctaactggattgtcttccttgcgcttctccggaccaactatcttgactaaccacttcggcttgaatgaagcaataacgtgtgccattatcaatccaagtaacagtccaggccaataccctataaccactgctttccagtttaacacttcttcatcttcgtcttcttcctttggctgtggtgttggtggcgcaaagcaacttccttggagaggaagaccacaaagacctgcattcccttcaaaggaggatttagattgcccagtgatttgtgtcccttgtggaatttcacctatgagttggttatgggccacacttatgtacgccaaaaacgagagggtcttcagtccattaggaatagtccctgagagttggtttcttgagaggtctagtgactccagctctgtcacgtttgccaaagacagaggaatatggcctgtgaatgcgttgtttgataagttgagtgcaatcaatgccttcaaaagaccaatggattcgggaatctgtccttcaagtttgttcccagaaaaatcaatggtggcataggaagtaaggacctttccttgctccatgaatagacctttgtattgcaaatccactgtatcttcgtagatatagtaaggattgttgtagtctcccatatagattctcccatcttcattcatctggagtgatgatgcttcccaattcacaaagtaatttggtggcaagcttcctgtaaagttgttatctgatatttcaagtatgcgcagcttgggaaacgcaagaggacctcgatcaggaggagatatagggccatggaatttgtttgaacggagggtaagtgcttgtaaatcaggcaaagccttaagccagaaaggaaatgtgtctttgattttgttgtggtctacacttacaaaccttagcatggagcaattcagaagagaccttggaagcttcccggttagttgattgtagccaacgtcaagtgtccgaagcaaggcaccatcagaaaatatatctggaagactgccttccaagttgttcttccggaggttcactacaatgagagactcttggaaatcactcaaacatcgaggaattggaccggttaagttgttgtaggataggtcaagaatagcaagagagcttcggttgcaggtttcaagaggtatgtttcctgtgaaactattgttccatgcagataagaggttgatagagagtggtggtttaggaaatggtcctctaaaatggttataagccaaatctaaaagcctcaccgatgaattcactaaaacttcctccgaaccttctaaatcggtgaacaaattgttaaaaagattcactctgcggagacgaggaaggttccaaaaccactcagggactttcccttttattttattgttggaaaggtctatatgctccaatttcgtaaggttctttaagatggttgggaactcaatgaggccgcaacttaacaagaccaaattctccaagttcagtgggatcttggaatctgaagttatactagtagccaataaactattaccggaaagaacaagcctcaccaaagatttgaaagaggagaaaaggtttaagtcaattgggtagcttgtttttaggaaagagaggtcgagatgcttgaggttgatgagctttgagataggctctaggatttgtccttcaaaatggttattcccaaggtacatgaactcaagcctagatgacgtagaggagttaggagcttcaatagaaccagtgagatagttttcacgcagatcaagagatgataagaaaggcaaagtgaggagagaagaagggatggttccagagaagtgattataggaaagcactaaaatcgagagtttggttagattttgtacaaatgggaaactacccgtgagctcattatgggaaaggtctaaaatgttaagctggctaaggttactaaatgaggaaggaacttgacctagaaagccattagaggaaagatacaagacctctaatctgttgagatttccaaatccagaagggagcgaagcagaggtgaagttgttatttgagagattaaggtaacgaagatgctgcaatccgaagaggctactgttaggcttcatagatccatgaaggcagccacttgggagttgtagctttgtgaccacaccggtcttgttatcgcactggactccattgaagtagtcagtttggttgcaatcgctggaatcaaactcgtttttgaactgtgtcagtgcttgaatctgatcgggacgacaaccagcaagtccaacaacaagagtgaagcttgaagcaaagataaaaaacagtaagagcaccgacagtatggtcttcatgaaaacttttatgaagaataacattatttaagcaaagagatggagaagccgagtatgatgtgttctttttagatgaagaatttatattctctttgaattttctagtgcaaataagtgatagttgttgaagactttatattctcattaaactttcttgtgctaatttaaagaatttgtgacctttttacaatgaaatggcattaaattttgtttgttggttggtaggagaagacttggttaaattgttgataacctttaacgtcttgaggataagatttgatgttgatttgttgatggaatggagaagaagacgttgcaaactttgaaaacagagacatctctttgcgttatcagtttccctatcaatcaagctcaagaactttagaaaaaaaactgcgagggttgatgcttgagcttgtgaattagtggagataatatcaattttggagaaagagagtgtgaaaatataaatctcttttgtgtttgtttgacaattcgtgtgacataagtaataagaagctgaaccagcaaaaagttaaccaatttagaccaaaactacactgcggtttatattaaaaccgttaatacatatttaatataccagattattctatttcagtaaagtcgaaaaggagattttatgacgcgacgacagcggagctattgcgatcaccgtcactcactctcgtcgacgttttggtggatgccaggtgatttcataagcaagagtaatcgaatcctcctttaaattttctttccatttttgggtttagctaattctctttctttgatcctaacgttgatgatatagttaagaaaagcaactctcaaggtcaattagttttgacgcaatcatgaaatgaaatcagttaatagtcaatttgattatagggtttaggggttaagcaactctggattgatattttagggtcattgatagctctctgtttgtattgtgcatactttctttctctgttatctgagaatattagttcaaagtgtaagaagattgttatatttagtaagccctctcatgatatttttttttttttaattcacatcaaactgatttgtttcatcagttgtaagtggtaacatttacttttagaaaaaagagatctcgtcaatgtatggtctgagattgatcttatactcttatgttcacttcatctagtttgtcttaacaggaagttgaaacagcgggctttcgtgcattacaaatcatcggctcgggttacttgaagaatcagagaagaaccgaagcagtatgtcataagcgcctctatctcaacaatctaccatgacattatcatccaatagagagatcgtaattaagggaaccaagagttacagaaactagtcaacttctttcttacatcaggtaacaacaacatatccacatactattattttcatatcacttcttcttctacagtatccttattattaaaactgtcccatcttgaatccagattcataaacaatctaactggatctacttgcttgcccttagctggaccaagtatcttgacaaaccacttcggcttgaatgaagcaataacgtgtgccattaccaatccaagtaacagtccaggccaatacccgaaaaacactgctttccactcaatcacttcgtcctcttcttcttcttcgtcttcttccttgggatattttgttggtggcgcaacgcaacttccttggagaggaagaccacagagacctacattcccttcaaatgatgattcagcttgcccactaaactgtggtccctgtggtatttcacctttgagttggttatgagctacacttatgtacgccagaaatgagaggctcccgagttctcttggaatattccctgatagttgatttcttgacaggtctagtgactcgagctccgtaacatttgccaaagacataggaatatggccagtgaaggcgttgttcgataagttgagcgctatcaattccttcaacagaccaatagactcaggaatctgtccttcaagtttgtttccagagaaatcaatggtgctgtagaaagtaaggactttcccctgctccatgaatagacctttgtattgcaaatccattgtatcttcatagatataataagcattcttgtagtctcccatataaatacgcccatcttcatttatcttgggtgatgatgctttccagttaacaaagaaatttggtggcaagcttccagtaaagctgttatctgacaattcaagtatccgcagctcgggaaacgcgagaggacctcgatcaggaggagagagatggccgaagaatctgtttgaacggagagtcaagacatgcaaattgggtagcgccttcagccagaaaggaaacgtgtcttcaattctgttgttgtcaacactcagaaacctcagagaggagcaattcaaaagtgattttggaagcttcccggttagtcgattatagccaacgtcaagcgtctgtgtcttagcaccgctatggaactcgtcaggtatacttccttccaagctgttcttcctgaggtttactacttttaagttactcagacattgaggaattggaccggtgaatttgttgtaggatagatcaaggacgatgagagagcttcggttgcagattgagagaggtatgttccctgtgaaactattgttccacgcagacaagtagatcgaaccgagtggtggagtaggaaacgctcctgtcatggagttataggcaaaatctagtaactgcactgatgagttaagtaaaacttctgaagaaccttcgaaaccagtcaaagaattgttaacaagatttgctatgctaagacgaggaagcttccaaaaccactcaggtactttccctttgattagattgttggaaatgtctatatgctccaagttttgaagggtcttaaagatgtttggaaactcgataatgtcgcactggatcaaaatcaagcttattaagctcaatggaaactctgaatctgaacttaaactggctggtaataacctattttgacgaatatcaaagaccaacaaagatttgagaggagcgaagacgcgtaagtcaattgggtgacttatgtttagggaagcaagttcaagatggttgaggtttatgagctttgagataggctctatgatttttccttcaaattggttaaacccaagggacaaacgaactagcttagatgaagaagaagagtttgggacatcaatagaaccagtgagatgattctttttcagatcaagataagacaagaaaggcaaagtgggtagtaaatcaaaaggtatggctcctgagaattgattgtaagaaaggtctaaaaaggaaagctttgttaggtttcttacaggtgggaaactaccagtgagctcattatgggaaaggtttaaatgggtaagcaagataaggttactaattgaggaaggaacttgaccagtaaagctactagaggcaagagacaaaacctctaatctggtgagattgctgaattcagaagggagtgaagaggaagtgaagttgttgtgagagagattaaggtaacgaagctgatgcaactcaaagagactactgtttggtttgagagttccagtgaagcaaccacttgggagctgaagcttcgtgaccgcaccagtcgtgttatcacactggactccgtttaagtagtcactgcggttgcagccgtcagattcaaactcattcttgaattggattagagcttggatctggtcaggaagacaagcaagagcgtcggtcgtcaagaagcttgaaacgaagacgatacagtagagtaagagtagcgagcaaaaatgcaaacgcatggtgtttgtgattgaaccaacaagttgaggaaattattgaacccaaaaaaagacatatcaaagatttgctatatatatgttattttaagccgcctttactaaatatgtggggtttaaatgtcacgtgaaatgtctacgagtcacatttgttcatgaagtaaattccacgtggacatctctgactatataactgggagttatagttgactgttaaaattggcttcaaaatttagcaacaagaggaaatcaacactcagcaatttactctcattggatcaaatgaacgcacattaatatgacgtaacgatgatgacaattctgtttaatagtatcttattgtttacagatacagaaaaataaattaagtgggcctttcaataattaataggttggtgaaatgttaccttctcttgatatttttttaattttcatttattatgagtatgttgcgttatgaaacaactcgcattaatttggttatagattggagaaagaagaagtcatggtcaaaactcaaaaatgtaaaaggaaacaagacgtgtatgacgacgtgattgataatctgaggagatacctttgggccttataagatgggccgaaaaagtaatagtattagcctctattcggcccgattaatttcaggggaaattttggtaataaagtggaaacgacgtcgtgacaaaactactgtgtagactgagaaataaagaagcccttgattttgcccattgcagtcatctctctcgaatctctctctataatccgatctgagaaatttcgccggagctaggttttgttgtttaccgatcaatcctttaatcaatggcaatggctgttttccgtcgcgaagggaggcgtctcctcccttcaatcgccgctcgcccaatcgctgctatccgatctcctctctcttctgaccagtgagatctctttctcattcatcttatccttgcgtataaacacacatttcgctgttcctctgtgatgcttttctgaatttgaaatcgtttgatttaattgagtcgttgatgttttcatttccttgaaattcgaatcgacgaaaatttatggaaattgtgttgtttgactcgggagctgctaatgagtgaggtgtttttgttcgtctatttggagttttgagactcggaaatgtcctgttaagctcgtttcgttgaatttcctattgcaagaccaatttgattttcctcgtagaagagactttgtgatatgttgtctaagctcgtcagatttaatcagcttttacctgcaaaactttgtgatatttaggatgatgaggactaaacttgtatttgatttgtagggaggaaggacttcttggagttcgatctatctcaactcaagtgggtaagtcaaagctgataattggagattggttttacctagttaggattgtgttctaagaaatctgtgatgttctaatctttatgaattgctttacatgtattctctgtgcagtgcgtaaccgcatgaagagtgttaagaacatccaaaagatcacaaaggcaatgaagatggttgctgcttccaagcttagagcagttcaaggccgagctgagaactcccgtggactttggcagccatttactgcacttctaggagataatcccagtatggttggctatatagagttgtttttcttaataactttgttctagtatcactccgggcttgcatcggtattgaatattgatgacgacgaacaaatctgttgctcttactatagtctgagatatccatcctcttgctatctcttgttgttattgtggatgtgtttctgatttctagcgttacttgatggaaaaaccaggcattgatgtaaagaagagtgtggtggtcactctctcttctgacaagggtctctgtggtggaatcaactccactgtcgttaaagtgagcagggctctgtacaaattgaatgctggtatgtttgaaaacactacgatggttccgtggtttagttttcctgaattgcatatccgatattaattcttatatcattgcaggtcctgaaaaggaagttcagtttgttattgtcggagagaaagcaaaggctataatgtttcgtgactcaaagaacgacattgtcctctctgtaacagagctgaataagaacccactcaattatgctcaggtagttcttagttgctaatagttaggagcaatagtttctctccccgatccatttgttctcgagctatttattgttgtctatagtgtttcttatgtttacttgctgcttcaggtgtcagttctagctgatgacatcctgaagaacgttgaatttgatgctttgcgcattgtctacaacaagttccattcagttgtcgcatttctgccaactgtgtccactgttttgtcacctgaggtaagtcataactgttgaacgtctcaatttgtgcttaatatttcacattctgctttaagtataaacttgattgtatatgtgtgtgttttgcattgaaagattattgagaaggagtctgaaattggaggaaaacttggcgagcttgactcatatgagattgaaggtggggaaacaaagggagaaatattgcagaatctggccgagttccaattctcttgtgtaagtaaccaagaaagtttaacttgatttatggtatttcagcatagaaagaaacataacattttggttgtttacgtaaattctactaggtgatgttcaatgcggttctggagaatgcatgtagtgagatgggagcaagaatgtctgccatggacagctcaagcagaaacgcaggagaaatgctcgaccgtctcaccctcacatacaacaggactcgtcaagcttctattacaacagagcttattgagattatctctggagcttctgctcttgaagctgctaaataagcccatccgtgttagttctcttttcttcgctttgatatttacccccaccttgaaggagaagagtgtgttaaaattttactgaatcagtttcctttgctggcttcttgttgagacctaccaatgtttgctcaacgatttttaataaacatacctgtaatttccagcaggatttcgaataattgcattaacattttgttctgattcagactcgcttcctccagagtctgtagtgttgttttgtgcaaacaccatgtactccggtttatttgatatttttttacctgagccaatattttgtcacttcgccaggttttgaagtttgaaactttgaataatcccacaaacaaatctaaacaatatatccaatgcagtgtatgttgtcatgctagtggatttctagaattttggaattatgtataaacaatctgatgttagaaagtttaaactgatgtgaatccaatcatgtgaaacaaattttatggctcaatatctcctcttgatcgaggtccactagggtatccagagctgcggatatttgagatatctggtaataaatttaccggaggcttgccaccaaattattatgagaattggaaagcatcatcactcacgctaaaatcaagaagggggtttatatatgatatacactaagaatgcttacggtagcatttcttatacctatcaagattttatagatttaagatacaaaggtctacacatggagcaaaagaggattcttactttatacagcgctattgatttttccggaaacagacttgaaggacagattcctgaatccattggtctcttgaaggcactgattgcactcaacttatcaaacaacgctttcataggtaatattcccatgtctatggccaatcttattgagcttgaatcattagacatgtctagaaacggactatctgggactattcctcaaggactcaagaccctctcgtttttggggtacataaatgtgtcccataaccaactcaagggtgaaataccacaaggaacacaaatcactgggccaccaaaatcctcatttgaagggaatgcagggctttgtggtcttcctctcgaagaaagttgcttcggaacgaaagtgccaccaatacaacagtcaaagaaagaagacaaccaagaggatgcaaaagtgttgaactggaaagcagtggcaacagggtatggacctggagttttttttggattggcaatagcgcaaatcattgcttcatacaaaccggagtggctcgtcaagataattggtcctaataagcgtagaaaccattaagatttgttagtgtttgatttttgaatgtatgtcaaattgttacttgttttgcgtatgatatttgaatgtttgtcaagtattccttggtcttgtggtgaagcaggttctctatgcttcattcagctttcctctgtatcttggaagagaaaaatactagaggccgggaacgggaatcacgttatggattttttggtctctgacaataaaaagtagaaaatccaaactcttgttattgttatcccacaggaggaaatccgttcttgttattttcatcattggattctatttccgtgtaaaagtaactttttcccctaaaaacaagcttctctattttgtaaacaaaaaaataaagaaacagaggaaggagacgagagggagaaacagagcaacatatgagatctgtttcctaatgaataaaatgcatgagagagagggaccgagactgagactgaagtgtggcggtgagatcatacggagcgtaaaaaaaaaacaagaaaaagatagatgttcccttttctgtgttttcttggatcccaagtaaatttttgatttcgttcacactctaagttcaaatggattgaaaactacgtgtgttcgtcgctagattcagtttttttagactagacaattcttcttcttcttcttctttctttttggattcttaagttccgacaaaaaaaaaaactagtcaatctcgttttccacacactgaacctggtccctagaccctaggcacatatatattcctctaatcaaatatttcaacgttaacgaaattatgttcagaccaggagaatgtactactaatagacataaactctttgtgatctgttcataattgggtttgtttagaataaatatttcctcttattcgtcagagtagataacacattttccacgacgtccttgtcgtttaggatttgatttcggaccttttgactccaagaaaacatgtcccatgcgttggacaaaaaatagtgacatgcacatgcatttggtattcagactttatgattcatttcccactcaaagacttcacttagctctaacttcttctaagtcaacttgtagctccaaagcaaaaccacataccgtttatttataccaatcttctctctcactttccttaaaccataatcatttaattttcctaaaatagttctcatcatgaagaccgtgtttaaatcgcttctgcttttgcattttctcttgctactcttactctgttttgtctccccttcgagctttttccttctaaaagttccggttggtggtcttgttgcttgtcgtctccgccagagtcaagcctttatgcagttcaaggacgagtttgatacccgccattgcaaccacagtgacgacttcaatggagtctggtgcgataactccacgggtgcggtcacagtgctacaactcagggactgtctcagtggaactctgaagtcaaacagtagcctcttcgggtttcatcagctccgttatcttgctctcaatcgaaacaacttcacctctgcttcgctcccttcagagttctgcaatctcaacaaattaaagctcttgtctcttttctctaatggctttataggtcacgttccttcctcatttaataactaaagtcagctttcctatttagatctttcccataatgatctcatgggtagtttcccgctggtgcgaaatctaggcaagctcgcagttttagacctttcggataatcacttctctggaactctgaatcccaacaatagcctctttgagttgcactccctccgttacctgaatctggctttcaataacattagttcctcacttccttccaaatttggcaatctcaacaaattagaggtcttatctctttcttttaatggcttttctggtcaatgttttcccacaattagtaaccttacccggataacgcagctgtacctccacaataatgagctcaccggtagtttcccacttgtacaaaacctaactaagctctcttttctaggactttcggataatctcttttctggaaccattccttcttacctcttcactttcccttccttatcaactcttgatctgcgtgaaaatgatctctccggttctattgaagttcctaactcatctacctcatctaagctcgagatcatgtaccttgggtttaaccatcttgaaggaaaaatcctagagccgatctcaaagcttatcaacctcaagcgtctcgacctttctttcctaaatacaagctacccaattgacttaaacctcttgtctcctctcaaatctttgtcttaccttgatttttcgggtaatagtttatctccagccagtttaagttcaagttcgtacatcccgctgagcatggaaagcatagtcttgtcgctctgcggcatccgcgagttcccaaacatcttaaaacatcttcaaaacttgattcatatagacataaccagtaatcaaattaaaggaaaaatacctgagtggttatggacccttcctcagctaagcttcgtggatatttccaataattcgttcaacggtttccaaggttcggcagaagtttttgtaaacttatcagtgcggattttaatgttggatgcaaacaattttgaaggagcacttcctactctaccactctctatcatcggcttctctgcgattcataatagtttcacaggagagatacctctttcaatctgcaaccgaacatctcttacaatggttgatctatcctacaacaacttcaccggtccaattcctcaatgtcttagtaacttcatgtttgtcaatctccggaagaacgacctggaaggaagtatccctgacactttctatactgattcttctctaaaatcacttgacgttggctacaatcgactaaccggaaagcttccaaggtctcttctaaattgctcctctctgagatttctaagcgttgacaacaacagagtcaaagacacatttcctttctggctcaaggctttaccaaatttgcgtgtccttacccttcgttcaaacaaattctacggtcctatatctcctcctcatcaaggtcctctcgggtttccagagttgcggatatttgagatagctgataatatgtttactggaagcttgccaccaagtttctttgtgaattggaaagcatcagccctcacgaagaatgaagatggcggattatatatggtgtatgaatacgataaggctgctaacagtccagttcgctacacttatacagataccatagatttgcaatacaaaggtctacacatggagcaagagagggtccttacttcttatgccgccattgatttttctggaaacagactacaaggacagattcctgaatccattggtctcttgaaggcattgattgcgctcaacttatcgaacaacgcattcacaggccatattcctctgtctttcgccaatcttatgaatctcgagtcactagacatgtcaggaaaccaactctctgggactattcctaatggacttgggagcctctcgtttttggtgtacataagtgtggctcataacaaactcaaaggtgaaataccacaaggaacacaaattaccgggcaaattaaatcatctttcgaagggaatgcagggctttgtggtcttcctctccaggaaacttgctttgactctagtgtgccaccgatacaaccaaagcaagaagacgaagaaaaaggagaggtgattaactggaaagcagtagctataggatatgctcctggattgttgtttggattggcaatagcacatctcattgcttcatacaagccagagtggctcgtcaaaattattggcttctgaaaagcgcaaacaccgttagaggattgacttggttttacgtgtgatctttgaatgtctctatcaaaacgttgctgttttcgttccttatgtttatttgtatcttcatgtgaaactttgttctatttccttttcaataaagtaagaatgctaaaaagattgtagttggatcaatcttacaaaaatagaaggaatgagaataatcgaacaagaaaaatggcatggcagggaaaataatggcatctagaaagggcaaactaggtttgactcatcatcgcttcttctccaattactctgtcccaaaaaagtaagaacctactctgttttgtaaaagtatataatgaagaaacagaggagatgagagggaaaagcagagcaaagtgatataaaggaacaacagttgtctctatgtttcatatatcgtatagcaactgtatagaatcaaatctgtaagataataacgctctccttatccattttatgtttcacaaatcgcagtaacaactgtacctgctctattctattttttcctttctatacaaggcaagaatcctttcgaaaatcatatacatctctctgtctttcttatctgtttcatcatcaatcaatggaaactgtaaaaatccaaagctaagtgttgtggaagacctggtggagagttgtagaaccactcttacaaattttgcctacagttgcattcatatccctgcaatcatcttctccacccactgagcgcaaatcgtaatatctgttgttagctggtgttagctcgtcaatggcattgcggatgtctctgacggtttggtctgatctaaaaggaatatataccggtgtcacagacccaccatcgtccaagtagatagttagtgtaattgtagtcggtgcagcttcatgccccacacttgtccagccttggatggcctgaggatcaagaaatgtctccgtgcttaaatcttcctcaacaacaaaaaaggccacatccaaagaaagaccatcaagagagatatatctaggttgctaactcctaatgtaaaactaagatccctatttttcctttacaggttctgttttaagctaagctttcaagctaacacaattcgagaaagtagcaagactatagtaaatagtgcagaggaagagaaggaaagttacatccacttgagacgatgccattggaagattagctacggtgaaatcagtcgggtcaatgttcgtcaaactgtacaagtaggtgaatggcggaaaaaagaaagattcagataaggatgttcagagatcttgaaagaaggcagagagactcatactaagtataatcgggaagtcacctagaaaaagagctccccgaagcctgaaactgtgattgtgaaggtagtcctatcaatggaagaggcgggttggatgttacatcctctgtgaaatatgcctcattcatgaaatagtcgatggcaacttgtaaactccattggcaacgctcgaggtaagcgactgcgacatctggatgcaatccaacaatctcacagaattgtttgatgatttcctctttgtttagcggtagttgctctggctgaatctgcagctcattcgaaatcggacaagaattcatcaccagtggcctctctgttggtgactcccactctggtaccgcggatatctcattcaccgaaaccactggcgaagatctaaccttgagggtaggcaagtttttgctgcggcaagcctctatcgctgaagccaaatcaccatcgaaggattcaaggtaatagactgcttcacctcgagacacaccagtttcagtgcagattctatcaatattgtttggcggtgggtggtcttccaagttttgagcagaactgctacttccctgaatctgaatgtagaaaatgcaaacagttaaaacataggagaaagattgagtctgaaatcaactctcgttttctctaaagttccttcatcatcaaacacaaagcttctatgtgcatcaatcaacatagagttagttcccttctttgtaaagactatcttaaggaaacagagcaaaccagaagaaagatatagtgcagagaaagagaagattagtacctgaacttgagacgatgaagacattataggtatatcgtatacatctccaaactcatccacatcaacgttcatcaatctgtacacaaacattttctcaggaatcaactaaaccctaaatcaaagaactcaccagaaatcgaattcgatagacaaaatcgcaagaaaagtaaaaggaaattacccagaaaaagaagaagagtggtcccctaattgataaccaacagaatcatgaaactgagattctgaaggtaaatgtaacgatggaagaggcggagcactatgctgcatcaaatccatagtcgatgtttcattttgtgagaatccttccaaattcgaaaccccaatcatcggcgtataaccctcttgaaaccgctgcaaatacgactgatcaatctccgtacgatcatatgaagtacgctgctgatctcgatcctcatagtattgggccccggctctctccacgtcccaattgaagcgctcgagataagagaggacttcttgtgaaggcaaatcagaagccactgctaggaatagattgattcgttcttgcttcaattcatgcgatagttcctgcggcggattcaaaacccgtcctgaatggcttctttttcttggcggcaacggattcgaagtcagacttggataattgatcgatcttggatcctgattcgaaacccgaggtggaattatcgttaatggagtagctgaatattcctccgccgtggactgctctgtaactgaaactaccggtgaagatttgaccttgacggaaggcaaggttttgacgccgcaagcttccatcgccggagctaaattccagtcgtatgcttcgaggtaatagagtgcttcttctcgatatgctccagtttcatcgctgattcggtccacttccattggattagtcatcgtcgtcttaaatttgggcgggactttcaaagaatctttttccaagacgacgagagacgaatgataatcttcttgaaaaaaacagcgtcgtttttttatagtagagcctgaaacgacgtcgttgtcggggaactctgttacattcacaaaatacgaagggtaaaacggtaaataagaaagaagagaccgttctagcttccaacgaattaaatcaaataacaaaaacattagtcgatattaattactataacttataagaaaaaactctaagcttcttttttttggtagggaaaactctaagcttataaatatcattagaaaataactttgaggtattacagagagtgatagttttttttgtctgcatccgttttaggctttgtcactgctccggtttggatccgatgtggcgtagaaattttattttcactgctatttgtatttttctataaatatatcaaaaaaaattttgagtaaaataaagaaaaataacaaataaatttttagttgatgtaaatgtatttactgtcgcaattaagtaaatcaaaagaattatgtaagtagcctaaaccatctttatataaaacatagcaattacagtttcatgatatattaaatgttttcgttcggcgacttctttcactttctgaatttattatgtaaatatttatatatatatttagataggtgatgatacatagttttttaatttcaaaaaatcataacatagttttattttatcaaatcccaaaacaaagagttgccccttgtattgttattttgacggctgatggatatcgcccgcctcagcaagccgttttatgtaaaaagggacgaaagcacaagatacgatgtaggactccgcataggccaaagtaaaatatatgaacagatcaattgaagtccactaccacatgtctttaaagaatctgagcaatatttgcacataatcagctacgtgaagtccactgccacatttgttttgtgcatgagtgcatcaatgatgtatcgaatcgatacgaaagccaaagccgcagcgattagaaaagctatcatttcattacaacgtttgacataccatggccatcggttcttataaatcaaaagtttttttaaaacaaaataaaatcttgtaaatgaaatatcatatgctaccaaatattaaataaaagcatttatgttatgttatttttagattttatactaatttatctctaatgaaaagaatagataattagataaaaacaaaatacgtccggctaaaacaaaaaaaaaacaaatctaaactaaagttatagtctcgcttgtttacagtgtttccacgctgctgcaaatttccttccgtcattgtactgtcgttttgtgatggctcaatcaccacagcaagtatcgaattcggatttatcggttgctcttttggcttcctcaaagcaactaaaagacccgccaaattaggcagatatgagaaataaatataatttttaatataatttttgaattcaaatagtattccacactttttatgtatagaaatattttaaaaccaaattttaatcttacacattctattttataatataatttaactatttatttataaaaaaaactaaattttaattttatacactccatcttaatagataagagctaaaacttttgattttacatacttaatcttattttttttttgttcgatcatatttaaattttaaatagtacatctatttttaaatatttaatattcttacgcttgtcttaattttctattctctttaaatattattaaatcacgtaagttacactttttagtttagtaagctactctaaacgttttactcaaatatacttacatttaattctcattcatcattgatggtatttagtttctacattataatctttatctatacatcacataattttttttgtattttgttatatttaattctcattcataaatgtattaattttaaagacaccgcactactataatattaattctttttattatatattttttgtataggggaagatatccaaaaccttggtttgtagtgaggttatatgtgggaaaagatcgtcactagcgtagagattatccgccatagcttctattggtgcaagcatgactatgtctatcaacttattgctggtcttgtaaattgtaatgaagcatttccttatgttttgagcttagcttgtagctaactcttctgtaatggctagcctctgtgtgcttcatttgaaattctctgttcccaaaaatcaagcctaatacgtcttctgccctctatttaatatgcaatcataataaggtctttagtttaacagcaaagagataaaaggaacaacggttgtttcaaatctctctatgtttcattaatcgtttcgtaccatacagtataagaaaactctctttatccattcctatctcaaacaactaagtgcaaagctgctctgttctattttttccattctatacaaggcaagaatcctttctaaagtcctatacatctgtttcctttctctctatgtttcatcaatcaacggaaactgtacaaaaccaaagctacaggtagatctggaggagagttgtagaaccagtagatatttcgtgtacagtaatgtctggatccatgtaaactacttcagccattgattgcaaaatgtagtctttctcgtaatctggtgttagctcgtcaatggcatcacggatgtctctgacagtttggtttgatctaaaaggaatatttaccgatcgcgtattggccaagaggatagtcaatgtaatagtagtccccccagctcgaggccccacaattatcctgtcttggtaggcaacaggatcagggaatgtctccatgcttgagtcttcctcaatacccttacccttcaagttaaaagacaaaacaaaatattgataagagaaacttgagaactgctagcagtactgtttgagtacccttttgttaagatcgacattgccggcttatgttttgcgcttaggctttagtaaacacagtccgagaaaacaagcaagaccatagaaagaaagtgcagaggaagagaaggttacatacatctacttgagacgatgtcattctaggaatagctactgcggcgttttcttcaccagcctcttcgagtgacctttttaactcggtcggatcaacctccaacaaactgtacaagtaatcaaatggcgggaaaaggatttagaacttgatataaatcaacatttacgagactatttcatacttcttggagacaaaatcgcaaatgaaaaagggacaaatcacctagaagtgcttccttctttcaagtaaccaagtgaagcctcaaactgcgattgagaaggtaattcgatggatgaaagaggcagctttctgttctccttcaaactcatattgactgccactgacgtttgatgctctgagaagtcctccatataaaagccgatggctcgatgtacatcccagttgcagactttaaggcaatagattgcctcctctctagtcgctgtactagccgcctcgcagaatgaagagatccattcatttttcagtagagacggttgctctggcgaattc

SEQ ID NO: 324 - DNA, 152593 bp, Arabidopsis thaliana
gaattcataagtgggtgtaatgaaagaaggaaaactgacaagagttacatgctgaagcgtacatatatttcatttgcattgtatctggcttttagattgagaagaacccctggttcatgcaaatacgcaagctttgtcatgtcgtccacaccaagctcaggaaactcaggatccttggggtggacagcattaacctttgccacaacctacaaacaaatgcatcacaaatatgagcaatgtattcttaaggtaccttaagaactaacacattgtctcgttgctttggagaaaagggactaaccgtcttggtttggcaattaactttgatctcttgaccgttagcttccacaacttctccatctagccaggcttcatctggatcttccacccagacctgtgaccccacagttaccttcactgaagcctgattaaagtagaatatattagaaacaaataaaaaaaatattgtcaagcttcattagctggttcttttgttctcttttagacacatcttataatgaaatctaaaatgtaaggggcaacataaaaatcagctcaaatagcaattatggttacagaagataaaaaaaaaaaggtaaaaatgaagaacacggagaaatcgcaatgcagataagagaagagagactcgtaccattatcacggccaaatctggtctgattttcctagaaatgatcccgaataaagatttccaacgggagaaacattagaaaaaatccctgagaacccaatcagctggtgtttccacaccatggatccaaacaccataaatcaaacacaaaacgcttctctctctctactagcttcaaaatctctgatcgacgttataaatgcggaagattaagactacattcacgttttacggacgatatttcaaatttctccgacgattacagagaccttaaacccttcggcttttgccttccaatatttccccaggaaagctggagattctcgcagaacgtaagaaattttctcgcgttttccctcggaatattctctcctggtttttttttgtttttgccttgtttgatgcttcgtctctctctccctcgtttctggaaaaaggaagagaaaagagaatccacgtaggcgtgtcaggtcagacatttgatgatctcgaaattacccctgcaattataccggatttcagttctaacatttctcctggaccaagccggtttatagtattcgattctaatggaggagatgatgacaacgtggcgcaagttgagtgtgtctatacatggagcagagcattttcttcactgttctcgcttcgccagacgttaatggcggatagaggagctctttcgttaccgcgagcttctacttatcttagtttctcaaacctccatgtctggcgattccacaaccctagatcttatcctccctctcgttctcaactcctctgtttctcttcctcatgctctagagtaacttcggcgaagataattcagctgaaccgccggagattcagctataaaatatgcgccgccgctgatgacggtaggggataccgtttgacggaaaggggaaaaaggggaaggaagcggcgggagctatgggaagaactttttgaagataatgttgaagacgatgatgatgaagatgatggtggtggtggaattggtagtgctaattttgacctgtggaagatcttagaggaaattgtagataatgtttggattttaaaggtaattagtttcaatcatgcatcttttaagccttaattatgaaattagccgggaatctactactgctaattgaaaatgctgattgattaaagtatcaaaattgttctttggtaatggttatggtgatcatgtaagaaacagttaatatcgttgtgtagtgaatctgaactagttttgatttctaactagatagtgtctttctgctcaaagataagagaaacggctttgttgatatatagctgcattttatttgcatacaccagattttgctctcttattgttggtgtgggatctttattgtgtttggtttatgttcactttgtaggcattcaaatcgtatggatatctcctcccattcatcatcttatcgcttttcttcagcaccggacccaaagctttcctcgtgtcactagccgtagcaatcgggccatcattgttattttatgcgttccagaagttgattggttgggataaacgcagaggtacatcaatagcaaatcaattcgggatagaggaagaagaagaagaagtggagagaagtagtagcaggattcgatacaacccatcaaccgttagaaacaatgtcaatggccgtggagttaaccgtagttcagctggaatggcttctaagtttggtgggtgggacgagttagacgggcttggtaccaccattcccgaacggccaacaagcgaaccgaagaagaaaccgttaccgaagaggaagagagtaagaagagaaaaggcagcagaaccattattgttgagattgttggtgtctttgtttccattcttaagcacatacacaaacatgctcaagtgaaaaaccactaaaccaaaacaaaccaagttgttcaaattaaaccgaaccgaaattggttaaaaatagagaataattatgagcctcaatttcagtttgagcatcaccatttcttttccatgactttcctcttatcaagaacatttatttctctcactctcagaccttcttgttcgatttccatggcgaatttaacgacgaacgctaaaactcgcctgagaggtgttgtattcgatatggacggaaccctgactgttccggtcatcgatttcgccgcaatgtatagagctgttcttggtgaagatgcttacaagcgaatcaaagcagagagccctagtgggattgatattctgcatcatattgagtcgtggagtcctgataaacagcagaaggcgtatgaaatcattgctgattatgagaaacaaggaatagataagcttcaaatcatgcctggtacggattcatctgctttatttttttatttttgattttgtgtttgcgctgaggaagtgttaaggatttgggttttcgtctgataatctatcgtaaaatgggttaaagattgagaatttcgtagagttaaagatgagaaaagattgcaaattcaaggctgaaagataaaatgaacatttgttaaaagtgaagactttatggtctaacggaggtttgacttttgtcttagagccccacatcacgatttgagatcattcctttactggtcattgactttatgctgttgagttctataagatgatttagcagttgaaaatctagaaggagtactgtgtttctttggcgtttagaggtttaattctcttctgatatgtgatcatttatgtggcaggtactgctgaactatgtggcttccttgattccaaaaagataaagtctgtggttttcagatacttctgtctatgattttttgttttcttgttcagataacttgactgttgttacattttgtattttactttataggagggggctaattacacgcaatgttcaaaaggcaatcgacatcttccatcaacgttttgaggtaagaatgttgaattgaagacattttgacagctgcctgagataggtttagctggatcattcttttttttttatcagagagaagaaatctgaggcagttccttacagttatttttcattgtataggttatcttttctccagcactaggcagagagtttcgtccatataaaccaaacccagacccgctgttgcatatatgttctacatgggacatccaacctaatgaagtcatgatggttggtgacagcttaaaagatgatgtgagtgacagacatgatgacaagcctttggtcaaccctttctccatagcaaatcgataagcaatgcaatgaaagaagcttaaacaatggatcttctcatgccattgcttaaagattttctatgtggaaaggatgcctaccaacttttcagactatttttctcacatctttactgaagattacaactggtaatcgatctttcttttctcgattctgcagatagcatgtgggaaacgagctggagccttcacttgcttgctagatgaaaccggaaggtatggaccagacgatttttctgtttccggtctgcaacctgattttaaggttgattccttgtccaaaatccagaacctattggagacgaacttcgacctgaacccgtagtttttccaagttcctcatcttgtagtttcagtgaccaaattagtgtcctactcaacacagtatctgttcaggatagccataaatgtcaaaccacggaattctatgcactggctatctttaagttgcacaattgtgtccctgcatggtcgtctagcgaacatgtgtgtgagggcaaacattgttgtttgttaaatccaaaatttcaagatttttaatatcatctctagtctctgaatggctgaatctgtttcttagtaagtcttccaacaatgatagatctagtgtgaaatgtgatcctgctaagtgaaaaagacttctcaatcgctattagtgtttctacaaggaaccaatgaatgcatatatcttcgtgaaggtcccagtggggtctttttgcttccctagcgtctggttagcacggtcagattatggcatgtcttcgcagaatcatgatacaaacaaaacatttgtatttgatggtgatctaatgccatattcccagaataatggcgattgcaaataagatcaacaaggtaaagttgcctccgggaagaacccatggcctgcaaaatcagaaggttttggtttcatatgaatcccatagatagttccaatgaagaaacagaggactacagagaatgttttgtatagtagggtgaagttacctgagcttctttctggactgttgaatataagccattgcaggaggcaggacaccaaagaggaaacagtttgcataaacaccggcaaaatccagagctctcgagaacgttgagggaaagaatgttgcaattagagctggaactccaaggacaaatagcatcactactgcttcaaacccatcacgagctcttgctggttcattgtatgaggctctcccattagttctcctatcacgctcttttgatgagaaacttacagacccaagtcttccatttccatttgattgcttagacacaagcttccatgtgtcgaggagctgtttcgggaagctaacagcatatccgattaaactggtagctaaggctgagaaagcaaagccttgaacagcagataaggcagaaggattcacagatagaagaagagagattgggtcaatggttgaagaaggtgcagcaggcacagtgattcttgcaagccccaaaacaattagattccaagacaacaccatagccaatggcacaacaccgcctacaagaatggctctccgagcatctgaaaccgaatccccagcgagattgcatatgaaaggcgtgatcacatgaaaccctagtgtcagtaccataacaggaaccgcgggtaaaaccatggagactttccaacatgattgaccaaatgaggctaacacattggacctagccacagataaaccaatggccacaagtgaagttatagagaagagcatgaggaagcagagacccctgttggtgaaatcaatggcattgaaagggaaaaacccgatcaagattccggaaactagagggaatatagcattggccaaaaatggattcattgaaggaaaccattgagacacaatggagccaatacccgagacacaagcaaccatcaaagagaaacttagtgaagcatacacaaaagccacgaaaactccaaatttgttcccaaaggatttagttgcaagtcctgtgaaactaacctctgctgcattgtcttcttccattgctgcaaagctgagctcagccacgagaagaatagaggaaatgacgtaaacccaagaacaaagtaaagcaatggtcgatgggatagaaccagatctgatagttgcagctgggaggccgagcattcctggaccaacggctgttccgatgatcaaactaacggcagcccaaaaactctttcccttcttcgtttcgtgggtaatctccaaatcatccattttttctaaagtctccgacttttcatctttgacgaactcagaagacacgatagttgagtgaggctcatcgtggtcgctgcatttgacaactaaaggtgagtagagagagccattctgcgaaatgggtttccggtaatctttggtaaattgggttggaggcgaactctgaaaatgacgacagtcgggaaacttgggaaaactcaggcgagaagagagtgtacgaaggacattttggggaaaaagattgaattttgaaaatgtgggcgttgctgcaatgggagctagagaatgttggcgaaaaggaagagccattgatgcgatgtgcaagattctctgtcaagtggacctgatttgattttgttggtatcaacttttggaatcttaaggctgtcttgtgaagatacctatttactctttagtgtctttttagggctttgtctaataaaccagacatgaggaattggtctaaccaaaaggattggattggtttagaaacaaattaaaggtacaatatctatctttgattatttgcctttcattggagtggtctaatcattggattgattaccgctaacactagacacagcctaaaactcaactaataactaatcttcatgtaaataaaatgtcttatgccaaatcaatagtgagttgcacaaaacagagaatgtaaggatggacatagagtagtctttctatgccaaatatttaagctagattgctagaacttagtttcgacatcaaagaatgtcggtaaacgacaagactttagaagcagcagcagcagatttggccttctccttattccgttcaactttgaagtccaacaaagttagctccatattcttgacccgttccttcaattcttggatccggagaccaccagcaattgctttcttcctctcaatatatatccggattggattggttcgggtttgaattgtagagagaaagaggaagatggttgatatttggttgattgatattctcgcaaacagaaaaagacatacaatacaatgtgtttgctaaactgatctaaaccaaacggaattacaaaataaaatagttataccgagtgactgaaccgaaattgatcaaaccagatggataatagagtacatgtcacatgcagcaatagtttctttaagatcgcaggagtttcctaagaaaaaggaagagaaaaaccttaagtttactaaaaaaaggcaaaagagaaatatcaagctaaaaatagataaatactatgggaaaaattatgatttgtaagcgtatgtccttctccaaaatctcgctttcgagggtggggagagagtagaagagaaatatcaaatttcccttcaaaagcctctcctctctttgttcaagtttttttccttggatgtgcatgtttcttgtggaacaaggcagttctgtttttaagtaaaattcatggcgacggattcgttcatcaagttaaatccaatttcctttaaccgtgcccgcttcgacctccgagattttgctggcataagtcctaaaagcatctcttctctgtgttgcattagcccaagattgatatcttgcaaccatttcagcccgagaacattgatatccggcgagaatggtaacatattgttttccaagaaaaagatccccgcgtttgtccgatgtcaggttagttcaaaatcattagaaaatttaatcttttttatcgaacatagttaattttcttgaattgtttaatccagacaagtcttgggatcggaaggaaccaaaaatggtgggagaaggaattgaaaccgaacatgaagtcggttacatcaccgcaagatcttgtcgtctctttacgtaacgctggagataaacttgtcgttgttgatttcttctcgcctagttgtggtggctgcaaagctcttcatcccaaggtaagccggtcttaatcatctgaaaaaaataaaccggggacagctttttacacgaaagatcttaagaataactatttaccaaattaagcaaaaactatttataggatttaatcaaaattaactcaagttatgttgacattgtgagttactttaggtacagtatcttggattttatatttttatcgtaaatgtgacttagatatatatatattttcagatatgtaaaattgcagagaagaatccggaagtagagtttctacaagtgaattatgaagaacatagaagtttatgtcaaagtcttaacattcatgttcttcccttcttccgcttctatcgtggttcctctggccgcgtttgcagcttcagttgtactaatgccacggtatctacgattctattcatttgttcattccattaacaactcgaaacttgattgtttgtttggatttacatttatcatttatgtttatattagtattgttcacattcaaataaacccacaaaccatgttacgttaaacaaaatctgtgttcattgtaaacataaatgcaaaacacttgagggtgtggaatctggatccctttcagaatggcttttttttgtattttacaatttacatatcacacttttgaaacttaaatgttttatttttttgtattttacataaaaataaaacattaaagtttcaaaagtgtgatttaaaaagtaaaaaacgcaaacataaaagttgcatttgtaaaaatcaaaacctaattaaacatgaaatgcacattttgttgttttgtttttgcagataaggaaattcaaggaagcgttggagaagcatgggagggagcaatgtagcattggagaaacaaaggggcttgaggagaaagaacttgtcgccatggctgcaaataaagacttgtcattcgattataaacccacatcgtgtggaaatatccaagagcaaaaaaagaaagaaatatttctcccgaaatctccaacttttaataaacaaaaagaagtagaacattctctactactagttagtcctgctcctgcatgaatggtctagcattgctgttaccatttgcttgtgtgattcaatatagagtagtcatatgcatatgtgtataatgttaattgtaaatgcaggttcatttggggggtataattgtgttaaagtttcttgtttaattatgtaaggtgagatagactcgtatttatattttaatctcattatcgaaaataaaataatgtatgttgtcatgttgtttgaaagaaaagagtagtgtaacactaacacatggccaaactatacgtgtcgaagttacatgaaattgtgagatgtgataattttcaaacaaagtttcaataagaagtcacaatcgtatagtttcgataagtttttgtaagaatgggacccactcgtatcttacaaaaaccaaacactccgtgaagtgggtcccatgtaaacaaagttaattaatctttaataaactgattggtagttgtttaattatcgatcactcttctagatttgtctttttctataatttaatgtcggaaaattgacaaaaaatcttattccgtatcattctctgattctagaaatatctctctaaattagggttttttctcataaacaaatacagtgctaatttcatatgtaaacacatatttttatagtttttgttaatataatggtaatcacattattattgtggctaatttcgtttgtagtgctgtagtcttcttaagaaccgacccgtgaatttctcctcttttctctctgttccatctcttaatttttttctccagattttgaatccctaagacaaaaataataataacaaagcttaaagaagtcattacagaatcatgaacaatccattattatcaatctcaaacccagtaaagttctttaaaccaccaattccgtacagaataagcttaaacaccaccattaacaagaaacagaagcatcaaagcaaaacccttgtcgtgaaatccaacaaaaggtctacaacatcattgactagtagtgtctcgctggttagaaggagaaacaacaatggcgatggtgaaacgacgctggttaaaaaagtgggtagagatgaaaaaggacaaacggttctgttgtgtgctttagggtattgggttcaagggttaaggtgtttctcatggcttgctcttaacttccatatggctcattgtcttaatctcaagccatcgacgcttcagcttgtacagtacactgctagtcttcccatggttgctaagcctctctatggagttctctctgatgttctttatattggcggtgctcgtagagttccttacatctccgttggaggttagttttctttctccaactgtcccggaaaaaacggtctctttcgcattatgctccaaatggtccaatatagtgttgtctcagtgcttttgcagggtctagcatggggttcgttggcgatattccctggtgctagagaagttcttccttcacttatggcatttattctgcttagtaaccttggagcatccattactgaagtttctcaagacgctcttgttgcggaatacggtttaagatatcagataaatggtcttcagtcttatgcacttatggcttcagcagttggaggaatccttgggaacttactcggtggatattgcttactcaagacacctcctagaatcttgtttcttgcttttacagctttgttatctcttcagctcattgtttctttatcttctaaagaagaatctgttaacttgccacggatcggagaagtaactccagagataagctctgttttggggatcgtaaagaaacagtttttggatcttaagggaattgttcaggtagatgaaatctcccagcctttgatttggatagtatcttccattgcattggtccctcttctctcaggatcagtcttctgctaccaaactcaagttctaaaccttgatccttcagttattggtatgtcaaaggttattggacagttgatgcttctctgtttaactgttgtttatgatcgttactggaagaaacttcccatgagggcgttgatccatatcgtgcaactcctgtacgcgttttcattactgtttgattatatcttggtgaagcaaataaatctcgcgttcgggatctcaaacacggcttttgtgctctgtttctctagtgtagcggaaattcttgcacagttcaagattcttcctttctctgttttgctagcaaatatgtgccctggaggctgtgaaggatcaatcacttctttccttgcttctactctgtgtttgtcatcagttgtaagcggattcactggagttggaatggctaatatgatcgggataacatcgaagaattactcaaacctgcctgcaggaattctgatacagtctttggcagctttggtgcctttgtggtttattcattatgttccaatgttagagcctggttttgagagagaagggaagagagctatgagtaagaaaagcagaaggaatagacgtgtagggagagtcataggtcaggaaagttttgcttaccggcgggaaagagaaacataaacaagaatcagtctgagttatagttagagctagttcttcagctgacataacattgtttcttgggaggagaagattttgtgcccatgtaagtaaggatggatactgatgttggtaaacataaaagtcccaagattgacaagaatctcataaatccaatcaaagcaatgttatatctcagttcacaccaatcttgctgcagcaactccaagaatctccccactgtttcattcatcgttcttggtttggagacatgagatgtcatttcttccaagacaagccaacgcacagtgtaatatcttgtactaggataacaatgacctagaaatgaaattaaagttttggttagaccattttttgaatagtaatgaaattgctatgtaatgaaagaaaatttaggatgtgaattaaagttttgattagaccattttgaatagtaatgaaattggtatgttattttgtaagagatttacggttttcagaaagattgtttgaatagatttattagcaaattggaatattcagtggctgagattaaagattccgatgatcttgtggttgtgattttaggaacctagtaaattaggaggtgtcactttagggattaatggttttgcatagttgatttctctatttaagagcaactctgacttctctattgcttcattactcgaaatcctatgttcctccttggctcttccacctccgatcacctaccacaacaagtttttctcctccttttttcgagtctttctcttccccttttcaaaatttttgaccatccatcatgtttctatatcatgaagggaaaccatcatcgtcacaaagttcattctttccgagtaacacttttggtaagatttctaacacatatatcacgtttaaactatcctctagagtttaaaataaatcatatatgttagacattgttcaacattaaaatatggtggaggcaatagatccaaagtttactagaccacttatttttgccgatcaacgacggtcaatggccaagtcatattctcaaatttttttctagtagtgatccgaatactctgaccttctctcctagtctaaataggattctaggaatctatctttgacatcaaagattttgatatgaacatctaagtgagcagggtccaaaaattaaatattagtctaaaaagtgtaattttctttataatttattttttggataaaaaatgaaagtttttgtaagttaatatattgatataatcactttcaaagatttcatatatcaatataaggaaatgaatattcttttatgttataaaagatatattttatccaaaagtgataagagcacttgaatacaaatgtggattgtactggcatagaaacaaatcttttatatattaattgagaagtatatttcagagtctaatggtaaaattttaaggaaattaccaaataaatgacattagaaattaaatacaaataatttttcatttattttcctttaatttaaatagaaatgtatagttcctttttgcttgaaaaaaaataaaatataaaaggaaacatacatttatatttaaattaatgaatataataaaatatattgtatttaatggaaacgtcattttggtaactttcttataaaaaaaataagattctagtctgaaatatattttttaattaatatagaaagatatgttttaatgttagtacaaatcacattaaacaattttgaactattaaaatttaatgtagacgattaagatcaaagttaaaaaaaatatctcaaaaagatcagtcatttcctctataaatacgtgattttagtccattgtcaaaacgtcaaaaacttgtacgcaaggatggaaaaaccaaataattagtacagaagaaaatatttgtctcttaagtcttaatagatccaactagccgaagaaatgaggtattttacaaactttcatttataattctattagttattaattatgatgaattccgatcttaagttcatacaaatgtatatgtattttaatgttaaaaatatctaattaatcacaaaactaatctgtaataaaaatagatttaaagatttgtcaactacaaaattttctttttgaaagttaaaattttcaaagtcattcttttgtaacatcttttccattcgtaatatttgcctatacgtacgaattatttacaaattaactaaatccaattttgaatatacgtatatttttccaatatacaggaacagttccgttgacaagttgagacaacctcgaagtaatgcaaacactttaaggccggatccgattcgtgacccgaatagtttccggattcggagcccaggtgttgtttctgtcttcggttcattgggaaggatgagtacattgttaccatttcctgacctcaacctcatgccggattctcaatcctccaccgccggaaccacagccggcgacactgtagtcaccggaaagttagaagtgaaatcggaaccaattgaggaatggcaaactccaccatcgtctacctccgatcaatcagccaataccgatctcatcgccgagtttattcgtatctcagagctcttccgctcggcattcaagccactgcaggtcaaaggattagacggagtctccgtatacggattggattctggtgccatcgttgctgtaccggagaaagaaaaccgggaattgattgaaccgcctccaggatttaaggataatcgagtctccaccgtcgttgtctcgccgaaattcgagagaccgagagagctagcgagaattgcaattctaggtcatgaacaacggaaggaactccgacaagtcatgaaacgaactaggatgacttatgagtctcttcggattcatctaatggcggagagtatgaagaatcatgtacttggtcaagggcgtagacggaggagcgatatggcggctgcgtatataatgagggatcggggactgtggttgaactatgataagcacatagttggtccagtcacaggggttgaagtaggggatatattcttctaccgtatggaattgtgtgtgctgggcttacacggccagacacaagccgggattgattgtttaacggctgaacggagcgccactggagagcctatagctaccagcattgttgtctcaggtggttatgaggatgatgaagatacaggagatgttttggtttatactggtcacggtggtcaggatcatcaacacaagcagtgtgataaccagaggctagtaggtgggaatctgggaatggagagaagtatgcactacggtatcgaggtacgtgtgattagaggtattaagtatgagaacagtataagctcgaaggtgtatgtatatgatggtttgtataagatagtagattggtggtttgctgtggggaagtctggttttggggtttttaaatttaggttagtaagaattgaagggcaaccgatgatgggcagtgcggtaatgaggtttgcacaaactcttagaaataagccatcgatggttaggcctactggttatgttagctttgacctttctaacaagaaggagaatgtacccgtgtttctatataatgatgtagatggtgatcaagaaccgagacattatgagtacattgcaaaagctgtctttcctcctggaatttttggtcagggggggatcagcaggactggctgcgagtgtaagctctcttgtactgatgattgtctctgtgcaaggaagaacggtggtgagtttgcatatgatgataacgggcatctattgaaaggaaagcatgtggtatttgaatgtggggaattctgcacttgtggtccgagctgtaagagccgtgtgacacagaagggattgaggaacaggctagaggttttcagatcgaaggaaaccggttggggtgtcaggacacttgatctaattgaagctggtgctttcatatgcgaatatgcaggtgtagttgtcacgagacttcaagccgagattctgtcaatgaatggggatgttatggtctatcctggtcggttcacagaccaatggcgtaactggggtgatttatctcaagtatacccagattttgttaggccgaattatccatctctccctccactggatttctcaatggatgtgtcaaggatgaggaacgtggcttgctacattagtcacagcaaagaaccaaatgtgatggtgcaatttgttttgcatgaccacaatcacctgatgttcccccgtgtgatgctttttgcgctggagaatatctcaccgttggccgagctaagcctggattacggcttggcagatgaagtgaacggcaagctcgccatctgcaactagtttttacaaagtttgtttttgtgctatagcttgagccttgaggtaaattctcatcatagtgttgttatatctttggtctctctgtcttgcttcctatggcattaatctcttacagcaatgatgcagatggagaaaattttgatcaaagcctttctctgctcgtttgttgttatgtcttccaacctttctgtgaagcaagaatgggaggcatggtcggtgagtgttctgcatccattttttgggggtaaaaacttctctttgtcaaatgtgtttgtacttttgttctgttattaatgtactgaaatttttgtatgtttctctctcccccttatgttagagcttaagctgatatataaaaaaaaaacaatgtaatagcaaatcaacaaaacattctgtaatttcttggtataaaaagcttttgaagttgtttattccttaatcttaaaatgtttgccttttattctgcaaattgatcagtgtttactcagtagtgaataaataaggaaaacaacaatctctctttgtttaattgtttaagtgaagtaaatgtgtttctcttttgtaaaaactgaggggtttttactatattttttgtgaaagtaattttggtttatgtaaatttatgttgaaacagaccagctcttgttttacttcgtgttagcttttgcttcttaccaagttaccgttgttacgtggaaccgaaacaaaccgttttttcgttaatctaggttaatctaggttaatctagtggctctttataatctctgtttcttcttacgaaacagaggatcggattaagaaagaacgaaaagagaggatttttaaaaatacttactacttgattggtcactgattgttttaacgttgaaatatctggtctgacagatttacccttggatgtactcgacaagaaaaaaggaaattagtatagtccgacgttgtttcgttgcgtgggcctgaagaaagcttcctttaatttccttttttgtttgggtctctactctctacaatctatataatacctgaaactctctacgctctatctccataattcgataaccaaatttgatagagttaaaccctagttagattaggaatggaatctcacgttttgttcaactcctcatcgatgaagaagactctttcttccagtgaaaaagacgcttatacttacaacaaagctcttaccttgaatctgaagaaaaataatgttgttaaagtatgttcggggttgaagaagagagaacatcagagttcgcacgctcatgaaaccggagaagttaagcaaattgatgaacagaatcatgttccagaaaaagtatccatgaagagcgtgagggataatagtacttgctacaaggttcgcctaacgctacagaagcctgatgttgttcaagtatcctcaaacttgaacaagacagaagatcagagatctagggcggctaatcatgaaaccggcaagaccaaacaaaatttgaagaagcctggtgattacaagtcttttgcagcgagaactattcaggtgaagaagaaatcagctttaccaatgaaactttctaaaaaccctagatccggggaacatgggccacctgtgaacgcatctaaaggttgtcctgtcttgaagaagaacgacaaggatttgttggaactgttcgagatcgccaaaaaatctgctgattttgccaacgcaaagggaatcctcgcgtctgaagtagaaacatcaatgtgcgtagataccctcgctttgctcttggagttccccatcagcgcaagagctatggaaacaaggaagctcatggttaggctagagaatcttacaaaacacaagaaccgaaaaatatgcaattctgtttcaaaacttcttcaatgttggaggcagagtatcagagatcaacaactcagagagtcccgtaaaactcaaggctaaatgtcactagggaatttaaaagcttatgacttgaaaacgttggttgcttgcttattcttttgcttaaagtagagtattgtagtcactgcttcaattacattactcaaaagctaacagtgagaggaatatgtatgtattaaggattttcacaatcactattataagaagtttaacctgtgtgaaacgttttgagttgtaaatacattatgagttttgtaatctatttgctttcttgccttatgtttccgtaaccccatttgatctgagtagttatttgtggatatattggcatagttctaagatcattagagtagactcatcaacaaaaacccttaaaaacgatattagataagcttcaaatatttacagtgtagtaaaagatataaagagcattctcttccatccatagtatatagtgaaatcgcaaccgaaaattaaaagacagcaaaaaaaaaaactaaagaaaaccagtaaaaaccattataagaaccaagaaaatacacaaactggatataagatcaatctagcttatgcttgcttcagaagtatctcagacttgcaaaaccccaaaatataaaacctgtaacaccgtaacgtcgaaaagagatctaaaccggctgctttcgctgtctctcgtttggttcttgatttcgtgcagctgcatatatattaacatgttttagtagaaatttttcattgcgtcatcttgagaaacaagaacaggaatcaagatgagattatctacataccgagtccattagcttcagaggttttcatcacacgtagccttttcaccgagttgatgaacattctaagataattccaacaaaaagaccatcagaaacatttattggaagtgtaagagataaataaacaaggtttttagatctattacctccatggaacatcaccaacaagcatccaatctccttccttatcttcataagtaagtacaaactcagacgatccatctaaaagcctcaacggtttagtgaactgactggttaacccgacagtacccggattagtgcgaaagaacatatcttccaatgtttgcgccaaattctcgtaagaagaatgagcattcaaatccacttttcttcctatagcaactccatccatgttcaccttaataaatccaacttgtactttcccattcactttctttgtcacatctttaggttcatcatctttcactttcttcttaccagcttcttcttcttctcttgctgactttgtagcttggttattaaccaaactgttcatcctgtgtgaccctataggaggccatccaacaacttgactgctacaaacaaagcaaacatcaagtcaggacttgtaatctatccaaatgaatcaaaaccaagaacagattcaactattcaagattcctaattccaaaccagagcatttcttccgacataactcagatcaagtatacatccaaacactaaagaatctttaagaaactcctaaacgaactatgttcagagaatagcaatttcacatcatacaaaaggaattaaacatcttaaaagatctttctttgaaaccaaaaagcttgaaaaagacgaaccttgaacgaggaggagatgaaccagcatgagaagcagaatcagcagcacgtttagaaccaacagaaggaaaatccttagccgtcaaaagccttccacgctctccccacgcgccaccaccacctgatttaccaatcttggccgccgttccaccgccaagactcagccctagaccaagctcaagctcactctcacctttccccatctcaagttcagtaatcatcagagagaccacaacaacaacaacaaaaacccactaaaagaaagagagccctagaatccaaaatcaatccaaaagaaagaaagagtcttttgaaagtcaagaaggcagagagagcaaaaaaaaacaacctgggaaaggaagacaaagaaagaaagagagagagagaaggaaacaagaaaacaaacaaacagaaagagacagagagaggattttaagggtttcttgaaatctgaaagagagtttcaagaattgaggaagaagaaagagagagaggattaggtggtggagagagtgatgagaagagtaggacccatatgtctggtagtggccataccaacaacaatgccattctttcttcttctcttttaccctttttttattccctaattttattattaacaaagaaattctttttaacttttcttcccgacattatcaaacttgtcgtgctcccgtttaccttattgttttctcctgtgtttataaaaaaatatgataaacaaaacaaacatatcttattaaactatattaaatatataaactgttgtttttgtgttatgtgtttgtatttgtggaaagctttgtttttgcatcacactttcttttctatttttgcaagaatttgtattcgttttgatgattgctatattagagtttattttgtattcgttgcgtttgatcttatctggttagctatgctttatatcatgttcatagtaacaactgttaaatatgtgaaaacgtatagctaagtaccagttttgaaaaaaagttgaatttgggtttagttttgggtcactatatgctcatttattttcttttctttttttcgtggaggactagactatgatgggttccaaataaagtgagaacaaaattggttttcattataaggaattattaaataaatagtggtgatgagattattcatcatcatgtttcttgatgtgagctatgatgatcctttgaaaactttttcaatcgcaattgatgtgtggaaaattctcttttgatcaaaatcatgactaaatgagaacattgaatttcatactctattgatggatttgctagaaataccaaacttagtttcaagaaatatgttgaaatttcacagtattaagatacagtaatatttcacaaccaaaaaacaagtacaagtttgttctctttatttatttagaaactcaggacacctgaacctcttcagacttcaaagcgacttattctcacagttccaagtacactaacagttagtcaatatcaaatagttgattctatgtttttcacgttatctacgtttgttctagaattgcgtgtgatttttatactcgttttttctttttcccttctacttattttgcatttttactcacttgttagtttttatttttttcttaggcgctacctgtgtcgttcctttataggacaaaaggcacgaacattgctttaactataaagtcgatacccaagtgggctgtggggttgtctgtaaaggtgaaataagaaaaataagtagattatacgaacagttatttattatctatcatatagtattaatgaatgctgtttacaaatgtttatgaattagagagaattcgtaggttttatagtaacttcggtatatgattttttagtttaaataagaaatttattaatgagtaaagtgaggacttatatacatatgcataagagtagtgatgcaaaagaaaacgtaaacagagcaaaataacagcttatctccggaaaataaaacttaggtctaaatgctcaaaaagtggtttaaatttgtatactatttaacacgataacgaaaattgtagatgtgagtttttctcatttactattcgtgtaaaggaaaagttatacattcttttcttttgtaaagctttttcaacgtcctgaattttttaattgatctagttcgtgtatatttcaatgaattaaagttatgtatgtaacgaattacaattgatcaaatataccgtgaattgtgtttgtctcttgtgaacatgcaacaagttgaaggttaatatcatttggaatcataaggaaaagacaaaagcagattcatgatacataacttgtaatcaaatggttgaagataaatgatggagatgacttcacgcttgtaaatatatattaatatatatatatattgataaagtataaacgttccaaaattgtaacatatgtgacattccaaatgaattttcacgcttgtagatgtatataaataaatatacatatttgtttgatttgattgatcttatattataaacatcccaacagtaacatataactattctaagaaaagatatataatgagagtattagtttgcaagaggattgtattctgtaaagtaagattaaggactagtcatgatttttagaaagtgataaaaatactacatgctagactaaaatcaatatgtagaaaaattagtgtttttattaggaccataacataaagactttgagactaaacaatattgtcgatatattaatatgttttacagtagatattaaaaggaaattgtctttgtataacaaagtaaatgatcactcgaagacatttaagattatcttagttctaatatgtgatttctccttacctgaaaaaggtcttaaattgtagaataaactatttcacacagtccaactttagatagccaatgtactattttgaattagtagcatactagcatggtccatacccatttcataacgatctttaaagaaaaagacccaaaaaaaaggttacaactttattaatctttagcaattaaagaatttattgcttccgttagtatatatcaacgagttttttaaaaaaaatccgaagacataattaaggaagttatacacaaaaatttagatatacgactgttaaaaatggaaatttattgcattcttatataaatcaacttatctcaaaacattgtctacatcagtcagatagtatatcagaattgtaagaaaaaacaaaacatattacttgcaaaacagtagaatgaaaattcatttttatttttttcactaaaatgatgaaatgacaacagttgaataaaataaactgaaaactgaagaatcatttcactgttctaaattttaccagtcagcaaatatgtgaggagaaatactgtgacaaattactggaaagtaaataaaaaatggttgtgaaaggaggaaaaaggctgtcgttttaaggggacaaaacgacaaggtggatcaaaccaaaaagtacttaatattaaaacgacacgttgttcaatggtctttgcggaccacccggatgtttacccgtttagtgcaagacacaaatcccctttttcgcgcctctttatttcctttttctctatttttaatctcgctaagtttaattattgtgtcaaactaagctataagcgacaattaattgatttaaaattctgaaccgaatccatcataaagtgatcttttatttcgtcggtccacgtgatcacatttgccaaaaatttaaatataaaatcatatagcttgatagcaaaatatcaagagtatattttatgcaaatttttacattttacaaactatctgaacttaccttatagtttcatgtgtattagtgtactgtatatcaattgtaataagaagaaaatagcatgcaatatttctcaatgacattttaaaagagaaatgtttaaaaatattcacaaatattttctcattttcacaaaccaaatatatagaaaataaaagaatattggtcagcctaaaaattaaaaataatcataaataactcaaatcatcagcagagcccaagcggggcaaacgcccagacccacctttcttttttgacccgtcttgatccgacccgcctccacacacgaatgtgcattccacgccgcacaaattactaaaacacgagaaaagtccgttacctcctccttcagtgtgacggcgattatgcttcttcttcaccgccggagttttcttcctcgagctttttcctccacctacattagcaacaaccatcgcgccgcttcctacatcgctgctttgatgactcgatcccagatcgtaaagcggcggaagctctgttctccatctctcaagtttcgatcggagaccttcgatgttactatcatcgtctaagctccattcactaagaatcgaactctctgtttcgtaagcttgtgatctctctttcgccattttctgcgctacttctgatggcgacggacctaattcggattctgttaaaaccggtcttcctgctaaattagatctcatcggagtaccaaattgcataggcgatttcatcggtgtagccttgtagttagatctaatcggagttgatccgacgatgttggatcgtaacggagtcgatccgaggatgttagatcttctcggagttgatccgacgccggtggatctcattggacttgatgaaaccatgttagatctgatcggagtagacgcgacgatgtttgatctcaacggcgttccgtgtcttgacaaatatggtgaagcgcggctgcttgtacggtcatagtctctcggcggtcttggtttctcgatcattggtgttgatcttctcggagttttgcgtgaacgatcgtttgatcgaaaaggtgattgatctatgaaatcaggttcgtgttgtctctcacttctcggccgcaacacattgtgatttggtgattgatctatgaaatcaggctcgtatgaatcgtatccctgacttggaatctttggggattgataaggaagtgcatactctatcgatttcgtcagctcggaatctgaagtcactgaatcgtgtcccgtcgttgtaggtacagtttccgattctgcgctcatcaacgcgctcgctggcttcctattagctacacgacttcgctcaactctgcttagaagatcggaaacgaccattgaacttgtatcgctccttgtacgacggagcattggcggtctcgagactacggattggtattgtttagaagatggtgattgtggattctttgagcttcctttgaagctattgagatgcaaattctgcagatttggatcttcttctccaagcaagtctctgtaacctactgcagaagagtccatattggtgtaaagtggcatgctacgcattgatccgtccagtattcccacaccgatgtttaatattccttgaggacgacctgatggtctgcgaacttgaagtgcgacgaatcgcattccgggagggggtgtacgacggtactcctcgttgcttcggtatccaggtcggcgatttggagggattaagttgctaatgaggacacggactgtgccaacgtgaacatcacggaaccaatgtaaagcgtagatttcaaccacgacggctgaagtatcggcgtagaggaaatcctcgctaactcggaagacaaacttgtcgttccaagttgggtttccaccaccggtgtaatctacgcgggtggtgagtttgcgttcagagtgaacccaagccaccgcgtaggtcttcattttacgtgagacaggagctagatcttgagcagagattatgttgagctctagcaattggaaagaaggaaatatcgacattgtttgtgtacacaatcagtgtttgttattcaaattctcagtcacatttgacgaaattaggagaattgaaaaagctatggaattggaaaatcgaattcttgattagccccctaaggagtggacgattctccattggatagatcattaagattgttattcgtttggtggcaaatctccgaatggtagggataaggtattggccattgcttcctatctcagttttccatgtttttattaacctttgaagcagagagaggagagagagagagataaaacgagtcaatcttaggttccatatttgggctattttgtgaaaaaaatgagagagaaagagtaaattagggttggtcatgtgataatctttagtaagatattgtagaagtttgctatattagggagtttataggatcaaattgtcaattcttagagatatcagatatgaataatctttatgcacaacgatacgatagacaccagaggctaataatctctggaaaagtgattttcacatatgatttatgaaagtcttttgttgtctcataagagacgtttttcatctatgtatgttgcttctatcacaattttgaaaaactgggatttttattcgtatgttatcaatgggctttctgatttgtagcccaaactgagagtcatgggccaaatccaacgtcatttacgtctggctagagtaaagttttaatttctctctttctctcgtgatggtgtgagcttcgtaacctttgttctccgttttgataaatgataatggtctctgaatggctgtatactaaattcgtaatattcttgtatattggttcttctattaaaaatttaaaagtaacaaaaatggaccaccctatgcaccacatctcatatcatgcaattaaatgccaaaacaattactacaagattcatcaaaacttgtgcggagagtattgatgtttgatcccaaaaggtatcaatcaagttccctattcccaaaatcataaaaagcatcacacttctccatgaaatcgcatgagtgttgtataaaaaattaaccatagtttctttcactcgagatacataaacaacaacacattgagaagtacataactcgactttcgtatttccaaatatataaattatgcacacgattattttctgaacaaataagatttaagtaatgccgaaaaaaaacatttaaataatgcaaattgcccacaataatacaaaacgcggtggaatcctactcattttacaagaaacaaataaaaattgccaggttataccaataaagttacttatcaaacgagattttgatagaaaaagtaccaaaaacaagttggcagaaaaaaacaactcgacagaaactcaaaaagcaactcaacagtctagaaaaaacaaaatatcatttaaaacatacgaaaacaaaaatgtataacgttatcagaacagaataatgtaaaatgctacagcatagtataaattcatttctgtttaagagttacccattgttaaactatagcataacatccaatagaatgacttcacggaacttgtaaaaggtatgaaattaagacaagtataagtacttaaggaacttcaaatgagataattcatttacatttttaaaaataaattgaaagtactttctccatcttctaacattttaaaatggtcccagctcttcttcatccatcccaccacaatttccacctctcaaaaatactgtattcaataaactaacaattcgaaaaatataaaaatcgggacacaattaattgcatgcacctcggaattcacattaacgcttgcctccatttcggggttgggactcattttgttgtcttcatcctaattattttcaataatctgccaaaaaaaaaacataagtaatcaattttttttgcctttattcttcttctcaacatatgcatgtgtatgtctattatatgcaagctcttccacacttaattttcaatatgctcaaattagaaggataattaatatctctaataaaaaacactgagtaatctattattttggcaatacaaaaatgacaactcgtatgaattacgttacatatgcatgtatgcttatagacgtgatacgtgcatgaatgttgtctacgtgtatgtatatataagtggagaggaagtaattaccgtcatatttcttcttcatcaagtttttgacgaaaagtaagcaaatgacaagaaatccaacaccagctgttcctcctactattattgccaccgttttgcctgttgttcctgtttttttccatcaaaaaccatttcatcatcctaataaaatatacctaaaaatacatttcctaaactttacgctctcttttctaaagaattaattgttacgaaaccgtagcaaactataatgttgaaaagaaaaaaacaatatttattcatcaaaatgaaaagaaacaaaaatcacaattggagcctgaaaacaaaagaacaagtttcacactgaaaaccttttgaattaaagtgaagatagtcaaataaattaattattaacttcaacatcgaatcattttctttttaatgaacaccttttcaagattttccagcaaatattagaacgttggtattgaaattttccaccaaaataataaacaaataaaaagaaatagaaattttcacctgaagaagatgaagaagaagaagaacccgaagagccagagctaggataaggagaagatctcttgggaacaccatttgggtagaaactataaccgacaaaacacttatgaagatatatctgaccagatattgagcttccacattcgacttgagctctctgtaacgcgttttttatgcaaccgctacaatctgaatcgcctatatcgccttcgcattgtcctaaaacgtaaaccgattcgtatgtcgttgcgtagaagccgtgaccttgaacgacgccgttttgcatcaccccgaaagctgtgtctcttctctgttcgaatcctgtcccggcgacgttgttcttcccacatgtcttgaataacaactccattcctaaagaaatttttaaaccggagttaaaattagtcaatctcggttcggtttatggttaaaaccgaaattaggtcgatagttaaaagtttctctggtttagtcgaatcctaactttggttaaacctatatctaaaaccaaaacctgattcttaaccgggttcttgaagttcacacagaaactcgaattccggttcaagaaacaaaaaatttcgaagaaattgagattaaaccaaataatggagagtaatacctgaaatttgggcaaagccagagatttcatagagaagataacagccggagagctgaactctagcagcaatggttttgccacagagcttaccagagagaacaggaagacgactaacacagttgtaacagtcgttgttacttaaatctcctctacactggaaaagaccagtgacgcttgtttggcttgttgttccagttgtggttttgtagaatcttgttttcgttgattgagtaaccaataagccatacattgcagagagagcttgtgagtataaaccagatggatctgataatctctgtcttgcacaacctttgtagattaggttcgtgtactctggtgaagaagattttgctagcttgagatctgagaacagagccatgatgatgatgtaaagtaacaaaagctgcttcagtgaataaaaccccatttcttttgtattgtgtggaagaagaaactaaaaaatcagaacatagtttgttgtagaagaagagttgttttgttatgttattggaggaaagatttttgtgggaattttgaggatatgggtaaatgagaaagattaaaatcttttttgttgttgttgttgttgtggggcttgtttggaatttaacttttttgggagtttatgaaattctgtgtttggtggatcagtaaaagctctttattttgcttcttctgagttttctgaatttggtgttaatggtgaaagagagagattttgtaagaggctgtggatggatggatgaccactcttttctctttctttaggagatgtggaaaaagaaataggattaggatagagagagtctgtagagaagggagcgtaatttgttttctttattttttaatataacaatcaaacactcttttctttcttcagccaccactgaccagtctaaagacagtacagtgagcttggtgtgtgtattgcagtctttgattattagatttcacttaaactgtttattcaacacctaactttttaaaattagaataactactcttttggtttcaattccatttgatgtttagaatttagtaatgaaacccaataatagttactttatgaaaacacgttttcgacaataattaaaatggaagacaattagtattatatttactctgatcatctaaaactggacaatttttttcccagtagctagtaaggttatgtattttgtagttgttactaattactatataaaaagttcatcgtgtaggtatttctttaagcttagtttatgtattttgtagtttttatacgatgatttgttcaagttattttagtattttcagacaaaattaaaaaaataatatagacagggagaaacataagcattctttagaattgtgaggaaacacgtggttataccttaacacgaattgtcaatcctggtcacaataaagaaagggtattacaaaacattatcttttgcgtgaagttaaactaatcctggaattgcaaaaggaatcacgaatctgatattcgtggataaatgtaaatattgtgcccagtgatttttgaccaagtacagtcaagggtattctttaacatttagttaaaattttgttctcagagaccagctgaaatcatttgttggaatacggaatactaagcagaccaccactgtctagaacagattaaataataccaaatgcggtttagcaccatcggtttgggatcttcattagtgtctgaattcatttggcaacagaaagaacacattttttggtacatatattgaaggtacaaagcgattaaaagagcctataagaaaactcgagggtttgtgagtgtcattgtttgaattccaagaggtagcgaggatgatcacaatcaccactcactcatgacccgcacctatgaaattctcccccattgctgcaaatactgtaagatacaacagaacttgagaaatttgagcgagataacactggagatggacatttggaatgttctgtctgagttttttacggattgttcacgagtcttgcgcagagtcatcatcgacgttggctttttcatcaccaggaagaccaaatatccgtagttacggtccatcgaaccgactgcaacgtactgtgcatctgaaccaaacttcacacacgtagctttacctgcaagtgtaagggcttcgaaattagcaacattatcgctatgtgatcattgaaggagttaggtaagggactttaccagtgccggagagatctgggagtgtcttgataaggttccattcagctttcacacttgccgtctggtatactctgcagccaaaacacataaattgtgttaacccaacgtgcagattaatcaagctagcttggtctctttggatattttctttagctgagctttggatgttttgatcactattttcaaatgtgtactcacttgatatctgatgcagcaataccgagataagatccgctaggatcaaactccactgcacacaaaaaaaaagtaggtttaatcaaagcgagcttataatacatagaaagttctctatcaacaaaatgagtagaaacagatacgatagttgtgtaccagagttcgcatctgcagataaaaatgatttgaagttccttaacttgcgcagatcccacaacctaacaccatcctctgcagctgtctgtcaattccaggacaaaaagaaaatcattcatgtaagcataacttaagctgtattctctcttctcgtattttgttcaaagtactcaccgcgaggaagtaaccattttcagagaaagatatagctgtaacttccccagtgtgtccatcaaacttagccacatttgcctattatcaaccaaaaaaatgaaaactataatgaagaacactgtacacaattaataattttaataggtcatatagtttggaagcccatagtttttacctgacttttaacgtcccaaatcttaacaacagattgagaagtaccggttccgagaatgagaccatcgggatgaaaagcagcagccgtgtaatctacattctttgaatcatctgatacctgaataaaaacaaggaatatgacaaaggctttcatgagtaaaggagctcgtactctaaccatacaccgaaccacggattttagctgatatgaaaatgctcatgaagaaagtataatccacacaattgtttcttgtaaatatatataatcatttctgttatatagcatacaggcaaagctagaaaggaaaacaggtattagttggttctttaaggaaagtgtttagggacctgtgcaaggcatgagccagaggacagatcgtagaagcaccatgtaccatcaagagatgccgagacaaagtatttatttgtgggatgcacagttacagctcgcacctgaataaagcatcattaactaaagttacacaaaaagtatatgaattaaaagaacatggaacggactgtaagagttcctcaaattcatccttacctccgcagaatgatcattcaatgtatacccacaagcataattcccatccccaggattccgccagatacggactgtctgcaggtaagtcactaatttagtaataaaaagataactatcgaacaattggtgatgtacatcctctgtgaaatcgaacagagcatccaacaaattacagagacttctggtgtgagtgatcaaaatgtgttttataactcgcagcaaacaaagttttcaaagatagcatcatgacatctacagaaaaagattcaatggctactagtcatcttttcacaatacaaataaacaaatgcatctgccggctactacttttcaaaacgaaggcaatacacaatgtgggattacaatttcctatagaactaataccaagcactattcataaaatatgacatatgaaattaccttgtcagcagaagcagtcaaaacaagatcagagtcgcctacaaattttacgcttgtaacctacaaaagaatcaacacatatcaagcatggagctacatgaaacaaattcaaacaaaaatctaaggcaaaaagttaaaaaccttcttcgagtgaccagtcagtgttgacaagatttgtccagaagggcgatcaaagagaacagcagttgcatcaactcctccagtagcaatgacatcctggtcaccgaattaagaagaaatatagttctgatgtaaatttttgcacaccaaaacttagcataatataagatcaaagaaatgcaaagaatccctggtcgtggtcgtaatacaaactatcacacacagcatataggtatgtaataggcaaataaaaatattatgcaaaaaagacataacaatgatatgatcattccccaaccaaggactcaaggctatattcaaataatttatacatagaagattagaagtttgccagtcggttatcacatgctatgaagaggctttcagaaacagaggaaaataagaataaggggatgtgattaaaaaaccatcagatgagggaccttagaatgtagaatgtccatcgaacaaatgcctggtttgttggtcttgtgaagtgggtggcttgatagctgagtgaacctctccaaagtatctattgacgccaatgtttgaggaatctacagaaaaatattaaaattatcaagacagcaggaaccaatacaaaaaaaatcacaagactaggcaggagggcaacatttttttagttaagtttcaaaccgaatactaggatctaaatagatatagtgagtataaatcacatgcctctacaaacaagaaaaaatacataaacgtagcaagtcgtcaggtcttgccttctaacattcaaatgcatattcaaagatagatacgagtctatgtgcagtacctgtcgcttttttcgcttctgggaaagagcagcattacaatcagtcaattccgtaataatttcagctgaaattccaggacacaatttctttgcatcaggacccagttcctcgtcaacggcagctattatacaacaaaagagtatagtgacatgttacaagaggaaaaaataactagccaatatattttgagtaaaaagtgtacaatcatacctcgtttaccattactcagagcagcattagctgtcacagcttcaggggccgcaggtatatgtctctcaacctcggccagtaattggcgtgcttcgtctctttcttttttaagtctagcaatcacacgacaagcagaatcatgctgcaaacagaaggtaaaacagtcccatcagtagactaaacacactaaaagatgaaatgagtgaggaaaataaatctagggtgcataaaacaaatttattgaccatggcacctcataaactggtgacagaaacacacagccaaaattacctgatacaaggcatgacttagctcttgccttgcagtatgtagttgttgctccagtgcaaaatttgatagcatcaaaccgtcccattcctaaaaaatgcaaagcagctaaacttctcacgcaattacttcgaataattcatcccaaaaaaatgaacaatttatgttgattagcactcagaaaaggagcaggtgatccgcgtaataatgttactaaagagaagaggccaatgtgttcagttaaacgaatcttgtatacatttaagaaacaaccttggaaaatttattttaagtcaatcaaccaaactctacatgaccaataacataaaacattgtgacatttcttagtgaacttcccattaagaaaacaagcataaatccaagagaaaaggtaggaacaaatttgcaaaagaacaattaaagcttacattctggaacgttccgagcaatccagggatactagctgtatgcaatgttttcggctttatgatctacacaattgacaattacattaaaaaatctcaaacaaatatcgtcaacagtactttgcatcaaatagttaaagagattacactacctccccagttttgatgggaacaatgtcatcaatggtaagtggttcgccagtaaccgggcacttcccataatcctacagaggaaaataatttagaagaaatcattcatttccaagtggcgtgataatctaaaagagctctcactggagatcggatctcattggtgcccaaaagaatttctcgataatttcacagtgctacaagaatcatccgaagtaaaccaaacaacatcactcaaattacgagaaatccttccagtgagaacaaaaaaaacaagacggtaaaagtacttggcagtgcttaattcagctcaaagcttaccgatatatgtctttcgattagtcgtctctcgaagagtaatcctgacttcgtcgaaaccactggctccacgggaacttctcctgaaactgaaagaacacagtgccgccaccaacatcaaccataagaaaaccctaaatcggcatattgagaaaaaatagagagagacgactgaaagctttacttgcacagttcatcgtaggaagaacgagtgatacgacgaagtacgagaactcaggtcgatgtagaacttcctgtgagtggggcggagcaagggttttatcttctccggtccggcgctacaaagcaaaaacgcggaagccgggaaatggttgaagagagagacgacgattaacactctcacttgatatattagggattcaatttaattgggcctttaacgatcaccttcttatatttgggcttttaaatcgatccaaccattagaatttgaaattgacgacgttttatattagttttaaaatctgttttaactcatgttgaactaaaattgggcattcagtaattttggttgattcatgtacatttactcattagattataaaacaaacccattgttttgttacagatttttttttgttatatgttgttgcgactatgttttaatctaaagaacgagcacaaatatcgaatgagaccgaggtaggtttgttctttgcatcttaatcgcctatcttatacccattacccaccaacactccatactcaccaacaatcaaataacaattaacaacatatcctcgatcacaacaaacaaaatcaaccgttcaagagatcctaaaaatatgttctaagatgaaagaataagggatatatgtttgtacatttcattgacaattagagatatggtttatctgttggtatatcgttatggattcacgttgcaaatgcgacctccacgggttcgatatacaaattatatacctaaggtcaaaatcaatggtattttatttttaatgtctaaagataggacgatgagggtaccatcctaagcacaatagctgtgtcctttctatttgcataaaagttatattcttaggatccaaagatgaaagcgaactctcatacaaatacaatgctccaagaaaaaaagaaaaaagaaaaaaaaaacaatgctccaagaaaaagatatttatgaagaaaaaattatttttcatattaaacctagattgaagaacgagctaatgacgcatatgtatagttcatatacgcatgacattttgttttgttttcaaccctaaataatacgtacgtataacgtttgagattatgtaattaatattggtgaatcgtaattatatatagataattaatggttgattatatattacagatgcacatgcatatataaattttcttcattttaggtattggttttatatcttgaaattaaagtggtggtcgttttctatttggataatgcgtgatgcatatattgcatttcagactttatatgaagatggtcatatcttcaaaagtatcaattcatcaaatcagctttgatcttaagctgttttacttttattttaatttcctttcgttaaattttaatctgtaaacaatttattgcaattctcgtaatcccaaattctgaacttctacacccagataatccttataatatgtgtcttaatcgctattatgcacgtgtgtagtgtagtttaagctcatacacaattttgtgttcaaaaaaaaaacctcatataaaatttagtttgtgcagacgacttgaaagtgaagtaataatatttttggacatagaataactagatagactcttgacaatgattttcaaatggtagatagacttttgtgaccaaaataagatactgaaaggcgatgttgatgtctcatgattagaacaaataaaaagaagagaactatattttccatgtaatgaaataagtgaaatacaaaaaacacttaagatctactatagtaaccaaaaacgctttcaaaaccattaaaataatattttatttttatcggcaacacaagtacaaatgtaaatcgtgggcttaaacaaaaagtgaatccgtgtttacctatttgaagactataaatgtgaaataaacactcgtaagttatagtttgatggataacacgtacgactcgtacttttgtttgtgtcttacgtaccgataatgagatctcgagcatgtagcctgtagtctctacacacatatcttctcatattaatttttttctgttatggaccttatggttattagaataacaaaagtgtacgaaagtgaaatattctcaattttgaataacaatgcattgaccctatgctcaaactgtcacaatcaaagcatttttctatatgaaatcattttcatattttttattaaaaaaaatgttcgaagttggttaaacattgttttcgaattttatctgatatccctaaatattttcttaaggcaaataatatgcttattgtccaaagacattttgtccagtagcattttactttagatatcttctattttctaatactttactgacctggtcgaaatctttttctctcctttgcgggaaatcatgagccaagtcaataaaattagcaaacgagataaaagatagaaaaatgcatatctaaattaaaaacatagaaactaattccacgaatatagggcttaatttaggacgattttcagtcaaaaacgtcaaaatccacggaacaagaattgggtcaaactcattgaccggtctaaatagtttcctcctacgtgagatcctttacccacgtcaacaccattatatctacgtgggctttccacgtcatgtgaagaggagaatcgagggtatcacatttttgcatcaagtccacgctggaatatattataaaaattatgtgaaaataatttgtacatacactgaaacacacatgcattagtttagtatatacaaatatatacatacacataaaaccaaaagtatatatatatatgtatgattgttacgtgaaactcccataacctctttttttccagaaaactataagaatttgaatttcttctctgtccaaacagaagaacctttgttctgtttttaattcaattacctctttgttttttcagtttttgttgttttttcctcccaatatttgaatttcttccatggattttcttgttcatcatacatcactcattccaatattattccacaaatcatccttgaagcctcgttcattaattttcttgctataattcatattttctcgggaattttctttattttcccagaaagttttcgcattaacattggagatatacaaagaacacaaacatgttgcaagacatgatctcgtctcactctcacgatcagctttccatcgtaattctcttctcattattgctttcatttttattcatgcaatgcgtagatgtttttgtctttgaaattttgcttacatgtatagatcatataaactcgagtctaatcttataaactgattaatttttattccgtagtcttttattcggcaactaccctataatttcagctagtttttcttttttggtgtaacgtcattttcttctacttatattccatttgatcttcttataaattgcttcattcttttcgcttttctttctttgttattctctccgcacttcaatttgtccttccatgcgatttttttttgaacaatcattatcataattctcattggcatacgattattacttataaaccaatagaaaatcgtcacatgatatggaacaatattgttctacaaaataactgtaaccataattcactatatctatcgtattttagtatagatttttattctcatcaaacgaaaaatgctagatttaatctctcaccttggattttatgcaaaatctacatattacgtgaatttcactaggagcattgtttgttatcatgatgggtttgtatatgatcatgatcataatgggtttcacacatgttctgatattttatgaagtgccctttactttttctttgtgggaaaaaaatctggatgttggttcataccaggcaattttaaattattttgtcaatacgaaaaggaaataccagaatcagaaaactttccgtttatagaaactccactcttctttactttatctttttagctattggaagtaattggaacacttcttcttaacatgtcacataaaagaacagatgcatttaatctctcttgtgttgtcctcaacaaatattgataacaaacaaacattggatttgatcaagacaccaaaatctttggagtgtttggatgtcgaaaaacagaatcaaaacatcttacagattcttaacatagttaagccagaacaaaattacttaagtataaataaatttctcttaagatttaagaactaatatcttgtagcttcttatgatttcaccagttctaatttcttgtgactcaagccaaaacctttgttacctttttttgatgcttggctttaacgtaatctcttcaaaagatcttggttcatttactttccatgctcgatctaatctttgaaactaactattgtttttattatcttaacaggatgatatcacgagccctcttagtgctcagatcttcgatttctgcgatccacaactctttcaagaaacctttaatcaatcctctgaagtcacctctacttcaaacattcttgagaaatccggaagcttccattccaacactaacaccaccacaacaactgagaacagtaacaacaacaacaacaacaagaacacaaaccttcaagacgatgaagatgacaacaacaacacggatctgtccataatctttgattcacaagaagatttcgaaaacgatataacggcttcaatcgatttctcatcatcttcactgcaatatccagtcatcgatcatctcctcacggcaataagccaagaccagtttgatttctcatcaggtctccaagttattcatcagcctcctaacatttcatactctggagatcctctgtctctatcggcgatttcctctctagctcctcctcccttacaatcaggggttttcgaagaagattgtctttcttcagtcccaagttacaatcttggtttgaacccttcttgctctttcttccgttcgtccggtttaccggcgtatatgagtaccggtttattatctgctgaaagtaatctcggttatcttcccgggaatattcatgtgggatcagaaatcaataagccacatgatccactgatggactttcaagctgataatggtggttttttttgtccggattccatcaaacgtatgtttaatccagaagatctccaggtaattgagtttttgttacaaatattttccggttaacgtttggttatctttaagaaccggtatggagctaagatttccggtcacaagaccgggttggtattctgatgtgatgctaaccggtttaattttgttgaagaaggcacttggtggtggcgccgagaaccagagccacttggtgacacctcaagctcatccagcattaggaccggtcgatataaacggtttagaagactcaacgttgaacaaagttggaaaactctcccctgagcaaaggaaagagaagattcgtaggtacatgaagaagaggaacgaaaggaatttcaacaagaaaatcaaggttcggtttttattaaaccaaaccggacttaaccgttgttaaatgttgtcccaatgatttttttggggggttgtagtatgcgtgtaggaaaacattggcagatagtcgaccaagagttagaggaagatttgcaaagaatgatgaatttggtgagccaaatagacaagctttttcaagccatcatgatgatgaagatgaagacgatgtaagaaaaccgggttattttaactcgatttatatgaatttatgtgaaaactaactaagccgattgggtttacagatgggagtgaaggatgaggaacaattggtagattcttcagacatttttgcacacattagtggagcaaattccttcaagtgcaactacccaatccaatcttggatttgagttccaagtgcaacaccacatatacctcatgttttaacatgaatcttataatagttacacaaatagtattgctatagagttatgacttgtatacttagttttgtcatgcccccaacaagttctgtgacttctgtcaaaaaaataaataatctaactcgtattgaaaataaataatgaataatgggtttaggcaggtttggatgaataaatcagtagtgagaataaggttgtaattatgttacctagcaatttggaaattttgtagatactatgatatgtgatgtcttgtatttgataagttgagttgaattttttatcacctgaacactctatatatataatcgtcatatgagttattattttgcttctcaaatcattcagatgttctatgcatacaaaatgaatagaccggtcaaattgtcatgtctaacacctggttagaagatctaattagtaattagataataactatttgatccaaaaaaaaggatagtagtaactatttttaagaaaaagatgaaataattgggctttaatttgttagtatcaaaatgttggactgggccaacagagtgttacagatcaattatataattaaggcctcccttgtaggctaccatttaagattaatgtaaagcttaaacgattgacaacttgatgcatgcgcaataaatgatgatcgtaccataatttcatggccatatatagttgctaaactgaaagaagaacaaaaaggtttgtagtaactttgtaatgaaataattcgatattttattatgttgaatagttctttttgttcgtttctgaaaagtgaaaacccatttgctaattttttttaacttctaagttctaaccgaggactgttaaaatataaatggcgactaagtcaataacttcgaaccaaacgtatcaacggcaaatattaaaatatagtgattttgactttagagatgaattatggtattgaaatgtcaccatcaaatttatgaaatcactatagatttttatgttatataaaactatatatattcaagagtttaactatgccatttgacttataaacacgataaatacagttttataatcttacggtcgaataaatgcaaagtgatttctttttttcttttttgacagcgcaaagtgatttcattgtttggttccttaatttatcgtataatcgaagtgttcagagcaaacaaaacttatcctaaaagtccaatgagttaaaaatttcatcatggctataattactcttttgaaaattaaaacatccgatcttgatctatatagatgatagacttacacaacttgatcacgacacaagtcttatcaacttcgagtctattttataacttattttccagaacatctacacgtgtgtcaaaaatcaaaaatatcgatagatatgattttcgaccagacacactaacgaactataaaatccaagaaataagactaaatcacatgcatgaagaaacatgtattctggttgatgcttcacatttcctttttaaaaaggttaatgagattagtgcaaacaaatggaccggatttggtggaggagaatcttagagtatacaaaccagagcatcaattttataatacgtacggtaggtcgactgaatttacacgtatatttaaagtcatatagatatatatttacaaacatataatcttctagatgaataattgaactgacatttacgatcttcaagaagaataatacacatatgtagtggaactaaatttcactatactattttatcgaaatttacgtatttgaattttgaaatttaaataaaaatgtaagtgaaggtgcaaccaaatggtcgagtcaaccatgtgccacaagctcacggtccggaatgagacaaaacagttttgtaattttgttgggttggtccatatattctcaatattcgtagataaaatatcaatatatgttctaaagcctccaaatgtcaaatattttaatcatgtataaaaaaggcaaaatatgtattgtagggtttgttttaaaactttcaaacaatatataggtttaatttaacctttgccattattgtatacggagctacctactttggaagtcgaccgttttctaacaaatcactcaatatctatctaattaaaaacctaccatttttataacacaatcatacaatttaaaaacctcttattttctggttgaatgtttatattagtcaagtcagtattgcatgtttagtacaaatttgttaaaatttaacaacaatcaaattgcaaaactaactagagaatttagaaactttgttgaaactcgtataataaatacatgcttgaaatttaagaaatttcttcttttgatgtgtaactaaatcttattacaattaatactacttttgtctttttttcttattcgtatcttttttttttccttaaataatggcctaactcgatccggtcttggtaaacatcatggacacttgtataaatttcaatatcaaaattggtcatccaaaattttctaatgatcgggctaatttcgttagcaaaagagttatatactaatcaactacatataagaacgtccaaatcaaaacctaagcacatgaatttgaatcgatccactacatcatccatacaattaacataaaaaagttctaaaaaatcaataattgaaaaaagaagatctaatgaaaaaaaaaactttaatgaaaataaaataaattaataaagaataaagaaagaaaatagtgaaaatagaaaaagtaaatagtagaagaaaatgggggagttaataatgtgggcactagtctctgaaacagtaacttctactactaaaaactcctgctttttcgccaacaagtagccatcactaccttccttttgattccctctctctctctcgatcgtgcccaccagctcactcaccctcctaaatccacactttaaactaaaaaaccctaaatctcgagccttgacacaagagagaaaaaagaaacacacaacacaaagaagtgggtccgcatttgtaagaatcaccattccttagtagtggccatagtcaagtgtcaccacacacacaccaaaaataaagacgttccttttttctcttcgtctccattggtacttacttactagtcagacattaacgtgcctttgtgaaaaaccaacccatctctttccctctctctagaaacccagagaagaaaactcttgcttccaagcttttcccactcataattgcttattagaaggagaaattttgcttcttttcctctgcttcctcttaacatagaagaaattggagacacggaaggaagaagatcgcaacaatccagaattggtggaggagattgcttcgatctaatcacttcttcttccatcctccaggtatagattggtttttaaaaatctgttcttggagttattactagtaactagcttgtgggttcctttttactagattggctttggtacatgaagtgattcagatagagaattttagtttctaggtcactcctgagtaaaattcctacctttctactttttctctgttagcttgagttaggtgcttattcttcaaatgtttctttcgagcttggaaacttcatcaaagttttagctttttctgtgattcaattaatggctacatctaaaaattcaagcttttctttgattgtcaatattgtgtagggttcttcgtttttagctttttgttgcttttaggtaagagattaggtcatatttaaagaccttgacttttccgcaaattagttttgttagcattaagagtctcaaattcagcttctatttgaaacagtagatttctgtatagtacattttgggattctgcacaattttgatttttgacaatattacaaaatacaaaggttgttgaagatgtcttgtgtccaaaatagttaaaatcttgttcacttttgacttaatatgctcacttgttctgttcatgtttgtctttcagattacttggaacttggaagtggtctttcttcaatctgtataagaagatgggaagttgaaatttgctcggctttgatttgagtatagcgagcggaacgatgggaagtgtttctcctgatgctcagaaggatgatcttgagcttgaagattcattgaacattgatgagaatctgtctgggggaaatggcttattgaagtcagggaacttgttgagccagaaaagacagcaatgtagtttagtttcaaacagcggaaagtggttacagattgttaaaaacggtcccaagggatctttttctcgtgccactagtttcttcgataacaagatcccaaggcagttggtgtcagtagacgagaagtatctccgtcgatgccttgacctgattaatatcagtgcgtttaagtcagccagttgcagcctttctttgaatcttgtaggatcaaagatgagtttgtcttcacgtcgcttcgatttacctgttatccccaaagaaaatgttgctcgccttgtgtttgatcttccgttggtagatgattcaggcagtccagtgattagccgtgcaattataggttgcaagagggttacatatatgcttgataagcctacgttacacagtctcgaagcattagatggtgatggtaataatatcgggacaaggcgagaccataatggtgaaagcgagttggtttcatatgatgttgtgaggaagatagaggaaaaaaacaccccggattcacagtttctgagttatcattctggaaacatgccccgaaaggcagtttctttatcaagcacaaattcattgagttcttcttcttctgagcaatcttcttcctcgtggtctccatcttcatcagtttctcaaggaacacttcaattcactatgaaagacaacaagacgcctcattttgttttctcactggatgatcagaaagagatctatgtagctagcttaagcactactagtgttgggtcaggtttcgaccgtagttctctagactattcgtatttgatccatttgaagaaaggtcgcggatctgagccgcagcatttggttggtaaactaaaggtatcaactttgttttctgtctcgtccacgaatgaaaaaactgtagagagacagtttgttctattcagcagtggtggaaatccgcagttaccgtgccacaaagatattaggaaaaacagaggattgcctaagaaagtcgttgatgctctcaaaagcaccaaacgcacttcaaggcaaagaagtatctcaagattcagtagaacaagctccataccggatttttgttcttgggagccatttcaagaacatgacagcgatcttgaacccataagtttactggataatgaccttccaccaaatcttgaaacctcagctgttgttgtgagagaacagtttccagtggaagaagaagaagaagaagaagtcgaaaaagttggaggctggggcatgaagtttctcaagaaaattcccttagctcgaaccaaggatgcttctaaatgttctaagcattccacaagcatagatgttgtgattcctttagggattcacggagggccgagaaatagaaacggtggtccttcgagcttgattcagagatggaaatccggtggatgctgtgattgctctggatgggacttgggttgccccttaaccgtccttaaaggccaagcgcgaaaagaccaaagtgaaggccaatgcaatctttttgagcttttcacagaggtagcattcaagatccagttaccacttccttaaccatacatcatagatttcaaaaaatggaaactttcttgcattcaagataactcatcaactaaaaaatcagtcttggtcatattgactctgaaattcgattgattcgttgtgtgttttcgtttcagggattgatgcagggaagtcctggactaaggatcatgaatgttcgagatggtctctactttgtccagtctcaagcaaagatatcagttttgcaatctttttcaattgctttagcatacattcatagccaaagccagagactccggccatggtcgtcaaagaagtgtacagaagcttaactagcaaaagaaaggattgcacaaagtaagatgggcaaaactcagccttcatagtttttagttgggttcttgagttaacaatatctacaaattagtagatattatttttatttttttattttttggctttctgtttaaatctatagaaagtatatcattgtctctttactggaatcatatgtgggctttggtattgtttttcaaagagttgtgtaaaatgtaaattctgacttttgattttcaccttcatgattttttttttttttgctaaatttgttaatatcattagaatgaacaatgtgattttacagagcaaaaccaaaccaaagcaatcttggcaaaaaagtaaaacaagattacaatagagttacgtaagatttgggtggattaacggatccaaagaagcattaacgaccgccaacgcgcccggtgccttctcgaggtgatgatgtttcgaatctcgcggtcaatgaacttgaagatgagggccggagcaagacgctgaagattgtgaagcagattatttcgctgcctccaaatattgtagaccacatgatttcgctgcctccaaattttcaccttcatgatattctggttttgtaagagtttcttctgcacataattttcgactttataactcatttttatgacctattaatagtcacctctgagcaattgattttcacaaaatcagaaactggaaaaatctaagcaaaatctcttagaaactggaaatatgtctgaagctcacaaaagattgtcgtctctacttaaaacactcaaaacaccaactatttcgcgtttcgttgaagacagatacataaccagcaaaagtgataaatgatcttcagacaatggcgttagcagcactagcaatccttggccagagatccgcacactctttcccaataggtccagtaattgcagaacctgaaaaccaaaacaaaccaccaacatgtttcagaaaacaatgtactgccaagatatgtttgacaaagaactaatggaataaacaaactaatacctttcatttctcccttagggttcacaatcactccagcattatctacgatccaagaaccgaatcagtaccaatctcatgatcataaacttcaactcgagaaattgttgaggtatgcaaaattaccttcaaagtacatgaaaacaccgtcctttcggcgccatggcttacgttgcctaacaatcacagcaggaagaacctttttcctgaggtctggtttacctttcttgacagtggccataaccatgtcaccaacacaagcagaaggtaaccgattgagacgacctttgattcctttaacagagatgatgtaaaggttcttagcaccagtgttgtctgcacagttcactgtggctgcaacgggcagaccaagtgacatcctgaatttgttaccagacgttcctccacgtcctaatcaaatcaaacaacaaaacacaagcaccattagaacaatgctcaaaaacatttaccttttctgttttcaataacatcaagtctcaaattcaatatttttgatatcaaatgttgttaatgagctgtctagatgaatacatcagatcatattacttggaattgaagaaatcgagatcaaaggttcaaactttcgagcattctatactgagagtagtagattgatttcaattattattaaatctaacagccatggaagcttcaaaaacaaattatactaaattgcaacagctacgaaagaagaaggcttggaatcgaaaaagacatacctcgcttcgacattttcgacggctcaagctctagggcttctgatgtttggcgtctgatcgaagtagaaaaatgaaggagaagaaaggattagggtttaaacctatggaaaaggccttttaggcccatgatagcccatgaaccattttaatcatgaaatgaacaataccaaattcttcttattagtcttttttttttttttgtaacatcttctcttatttatataactttgaaacatagtttacaaacacattaattatacaaatccccaaactgaataacaagacgaaagaagctaaattacacaatgcttttcttcaaaaagctttattcgctaaccaaacacacacattcttagtcttgtttgcgagaattggccctctctttggcaatttgttcaaataaacttccatcaaagcaacctctcacagcttctttagataggaaaccatcttcgtccttagcaagaatatagagtagtatccattcaactttgtttgaaagcctgccataaccaacacaacaaatttagcagatttcgttaggatttagtgttaacttattaccgtgtatgtaaaatcaactaataaatttcattcaaaaaaatcaactaataaccaataatgtttttagtactaaccatccaaaaggatcgattgccattcgatttccctcggttacattccaaacctctttaaatgataacttatctttaaccgttagcgcgtatttgctaaatatgttctcgaggttaactgggacatacctataaacaatcgcaattttacaaaattgagtatcatgaaaattctatttaaaattattggatattatattttacatatatgttaatgttaccttccttcggtgtcataggtgctcgaatcactcccatgcttggctttgtgtatgttgtcgatataaaccggcaataatggtgatggcacccaactctttttacataaaattgatcacaacataaattaaaatcacaaaataataataaaattcaaattaaattcgaagggtctctggattattttccataccggaagtgtaacgtagctgaacgctaagtttatgagtaaggtccaaaagatagaggaaattgggttgaaaccaaggtcacgaaatcctgcaatttttatacaattatttgaattttttttttttctgaagattgaagtctttgaagagactataacaagtaataattacccttataagtctcccaaggatagacgattccatcgtcgttttggtcgaagaaagcaacatgttgttgcataacactcattcctttgctatcgtgaccttctgttccattcggatgctctgtatctggagctgctaatgctcttgccatgtctgtttttcatttttgtacgttagattattatgtatctttttcaagaaaattacattttttctttaagttattgtgacttgtgttgaacactacaaatcttgaaaggtacacttaatttgaaacatgttcatgtcctcaccataacttttaaaaatggataatatacgatttgtcatgttaatagttggatgtttttgtagtttcatttaacgtaaccacttaatttcccgcttgttacacattaaaatcataaatttggacattcacacttacatggttttggtaatgtttcctccaaatcgttccgtacttttcgctgactggtgaccggagctaacggtgccgtcgtggccaaagcctctgcctctcctgccattctctctctcttactcttttacaatctcgctgtcttgtgtaattgttaataattgataatgctctctgtttcttcttatgcaaaagacgtacacattgatgttttggtgttcgtgatcctttataagtaaaacgatataacaaggatgatgtgaatagggacacgtgtcaggaagtagtggtgtaaacatttaaaagaaaacgaagacgacaagcaatatgatcacatataatatggtccatccacgtggttattttcaatttgctaaaatgtaattgtacttttgttcacgaggaggacggtggaaaaaaccaacgtgcttattctatgagtttaggaagagactcaaaagatagcatatgcgagcaaaacatgattgactgggagcccataacatctcagaatgatccatcctctttcattttgtacataacactcccatattatatgaaaccgtagttgtttgcaagaactgattcatcctaattctaattagcacatatatacttaactatgagtatcaacaaaccgaccggttgaatacatattaattatgtagacatgtagtgatgatcaattgatcatataccctaatttgaacttttttgctcgttatgatttaggagctaacgttgccgacgtgctcaatgtgtgaagttttaggattgaaatttattgattacaaaagaaaaaaaaaggacgagtactgtgaccacaatatgtggtcacatgcacgtggctggaaccatttgctgatttgcgtgtgcggtggaaattaaaaagcgggattaagagataccaatagattgatgatttcgtataagtgataagcaaaaataataaaatcataacttaactaaagtatttaaattacaaaacctacaaacatttatgtattaccattttttggccgtatctcagtgtgttgattggttacatttttttttttatcacatgatgattgtatacattgaaaagtaaaaagagtgaatggtacttgtacaaagctcttacgtaacatgctgcattcaatgccaacttttgattaggtttatttttggtttaccaaattatatccataagtttatctgataacgtttttttttgttgtcaagatattcattaacgtataatattgctccccgaattcaattttaaagcatgttgacaaagaaaaaaaacaacaacaccgagcctctttcttgagactttccaagttaagtgattacttagtccaattttgtgtatgatttatctgatggtttcgaagagaatttggggagagatatccaccgctgattgaatcgaaaccgagcacaaccgttgattttgatccggaacttgcttatcttcactctccttgtcatctccttgcatctttgtttcatcatcaatttaccttttggtaccttcacaaactcctttacgtatttgcatcttccgttttctatatagaaattagagaatggaaaagaaaaaatgataatataacttttttatatatacaaacctaagtaaggttaaaggtaacaaaaaaaaaggataccattttgagcagcttcttcttctaggcttgtgttatttagcagctacgtatataatgtaaatttacaaacatacgttattttgtttatgaaatgtcaactattgttgtagattcgtgtgtgtacgtaatatatgataaaaataccttaactaaagtttccattctttttctcatccgtctctgtatgtaccctctcgagcactatttaaacaatacgaggttgaaaattttcaattacaagaacacaaaatctattatattttatttgaaaaactagaactaatgtaccttaatatggtacttagcgcatgcgtagaaatttagcaagttccaaaccgttttgtccagtctctttccttcaatgtgccgtgaagtaatatctgcaatgagaattgtttgaactttgacatttaagaatactaattaaagatgttggattaagttttataaacagataaaatgacacaaaacgtaccaaatgatacaaaaccagaattggtggtcaagtcttgaaccggttctcctctaagttggagaggaggaattggcgaccaactacattgtggggcttttcccatatccttttggcttcccacttcaactagttcctttttatatgtattgtccaatttgtttttaacataaaaagataaaatttgacaaaggaaaccttagtgacgtctcaatgcaaaactctagtcccacccattgattgtatgcattttagttgtacctggaagaatgacgtggcgatgaccacatccgaattgtctttaaaattcatcggaaacacggccgtgattttttccggctgaaaaaacattcaaagacttattcttatagttatagttattcgataaattttagacgttggtctctatccattattatatttagttggatgtaactcagataaacgaataaaacgcggtaaaataaacctgtttaaagacgtagaaaggttcacttgggtgataaacaatcctgatgggcatgttgttgatcgatcgtgaatcatcttgaaaatttaaacttctcagcatctcttttagttggctacttaatattatcgcttgtagttcagaaatccttgtaatgattttaatcgcttctgcatttgaatgagtaaatatgaaaaaaacttataataactaagtagcgggaaaaagtacatttcaatattgaagcttacctttgccacgtggtatattatcaaggtttaggccaagggtcaattgaaaccctaatcttggtggatcaacgatgtcaatcacaccaactccaatattcttaatcacctcataagtgtaacttgaaatctccttcaatgtcactgctccttgtgtctcaagcaacgtcgacgtcgatacatgcacaatatttggatccgaaaccgagtactgcatgtccaaatcatatatatttcattttgtaagagcacatataatcgaataagaaagaagattattattaaaaaaaggaagccccaaaaatataccttgatatggtattcaatcgaaccaaactcatggaaatgttgatcgacctcaataggtttttcagcactgccatggattcaataaccttatgttataatgtctcacattggcattggatatgaacttattgccaattgatttttagttggaaattaatgtttactaaccatactaacaaaatcatttcaaataatcttgattgaagttaagccggaaaatattgttaggtacggaggtagctaaaccgggaatgaaattggaccagagaataaaagagagagtgtggcttaccggtatatcttgaggagtgtttctttcaacgttggagaggctctttcgagatatgccattcttgaaacacctcggaagaaacttgagggtacaataattataatttacaatgtcatcaatctataactttttatgtgtgcattgcacatatatctgtgtgagagcctaataagtgcgctttttctttcgtgcattggtgaattgttggatgttgagtaaaatgtcagtttaaatttgcaatcatttttttatctttctttctaagaaaacattttagctattgtatctgccactgaaacgtaacatgtggatgtacctgtgagccgaatataaacataggcccgttgataaagagttttaatgctttctcagccttcggactaaagctgtgggatccgatggacgccgattcgcacggtcccgtgatgacacagaaggaatttgacagaggtagaatgtgttttttccaaaaacttagattacatctaaaatatcgaaaccatggaaaatgagattttcatatattttttccctgatctttattcaacctcaaaggcaaaattctactgttagaaacataaatgattgtttttctattgtcattatgtggacattaatcttatcattaaaaaagcaatacttggaatgtaatccaagctaatccaatgaacattaagcgtcggtttcacacaaatcgcaagctattattgacttcaccaacatatagttattagtttaccccacatactaagtcacaattcttctttctattcagtgtggacgtgaggtttacttagggtaaaagaatggtcattgtaaaaccatattatctgacatgaatttataacttatttattaatattatttttttatgaaacaggaaaataaaatcttttagcaaaatgtgtctttgttatgatgaccatcaatatataaattcatgttttatttatatagattcattttgataatacaacttgtaaaataccctgatttgttatataatttaaaactataaaagtaatcttagtcacataaaactatacatatgctaagataactagacctctatcaatttaatttattatcaattataaatctagaagtctatattgaatttgtcaacatgaaaaattcaaagcttattaaattatagaacacataaaagctcaacaagttgtttaattaaaatattgttgtttaaccaaaaaaacaagtaattaaaaagttgcaagtttgctaattaaaaatgattagtcaacggccgaagtataatctcataacgagattacctaccgtgtgccaaaacaagttttaatctcatctacaaaaatatctcaagtttgatcttagccgttaattccttatttaacgaattttcttttcgcacactttctcgacacccaatcagaactcagctgagagaaacgcgtctctcagatttcaatccttcactttcccttttctttttttctcgttatcggatcagaacaaaattttgggaaattcgaggtttccctggattgttggattcgattattgttgaaattcgatatgggtgtttgttgtttgtgttaatcgttgtcaaagttttgatttttttcctcgagaaaatttgagattttttcgttcgtctaatcgagagaaaacgcagccattttactacgtaagtaatgctttttctcatttccagttttctgatttcgtatcctgatcttgattcatgatccaagcgttgactttgatatattagaattcacaaattttcagattttgtgattagggtttgttagattcatatttatcttttgttttgtatcaggatcaaattcaaacccctgaatactgaagcgaaattgaggttaatggttagggagcttagggtttatgaatgatcaggtggtatttggtatttgacatgaattagggaacacgagtgatatctctatcttctccagattgtttaagcttggggtttagtttccatagattgaagatttgctatggatacgggtcgtggagagggtaaagaagctaatggatgtgagaataaggctatagttagtttaaatagcagtgaaattgaagatcaaatctttgaggaagaagaaagtgagtcacaatgtttattgcctccaaggaaaggaggcatgtctagaagcactgacaagattaagaggactgtgcagtggaatgacattaaaggagacaatcttgctgaggttttagtttatgaaccaaggtaatatcatccttaacaacactatctctgtagagtattatttcaagtttttcgctgtatcgtgattctcttctcttttatttggtctagctcttacttaaatgttaatgatttgcaaatgcgggattcgtatcggaaaccttaggttagttttgttttggctatttccgtgcttttggagtggtcttcttgatctttgactggtggtctttttgtttaagaatggtttccatagagaaattcttatagttgctctagccatattgtaaaccttagattagtattgatttgactatttccaatatttttgttgatgagcctatgagaaacaatttggcttccctgtgtaatgtagctgataaatttcttatagcgtttgtgctcctatctggcagcagtttagtgtactaactgatagacgaaacaaacctgtagtcctgtttctcacttcaatttggggttgtggaatctgaatttagtaaagaaccttgaagataatctacttactatgtctagaaacactaactaaacccattggaaaagcttgtcgtttacatccatattggtagttgaaggtccaatagagtagttatcttctgtttaagaacttactcttttacattgttgtttttccccttggcaattgaaaacaactatatatcttacgtctgccattttatgcttgcagcgaagttagcgatacagaggacgatgattcagattcctgcatctgcacaattatgtagtccaccaatccgcaatcaaccaccattaacatggagtttaacaatgagctcgtccttgtaatctgacttcttttcagccatcagtttttgtgaggacagacaaacgagaacttgagcgattgggcatcacaatcatgtaactgtctgatttttatgctaaggtgacttctgacaagaagccagtccaaacaagggatttagactcataagctatatcagattgtctcatctcagtgacaagagtgagtatatagattattattgctgtattgttcaatagaggctgatcttcaaagcgaagatcatcgagtgctgtttgatttgacagtgttttgatagtaaactatgtatctgtttctcgaacatacacacttgttaagttgtaagtataatatgcagcaatttattattttttctcttcttcttatagtacttgatccaaaaaagttgaaagatcacaacttgtatcaagatgtagttgcagaaacaaccagtgggaagaatagccctaaaagggaaaacaaatacaaacctccatccatacacacacaaagaatcagaaatgctacaaagacaaacaaacaaaacacagtttttcttcttcttccttcttgttaaccactgtgaaacctttacctgttctccatgttggtgatatccacaattggggatctcttcgatgaaccattcgcatgaagactctttggtgaggccaaccaattggaaaggctagtattaacgattatctccttcagtagtggttttgcttgatcatccatatcctcttcaacattctctttcattacccgtttaactttcactggccttgctttaaccgctttccactgagcaagattctccactggattcaaaagaggagccacgtcctgctcattctcttcttcttcttcttcatcttcatcatcagcatcatcttcatagtcgttttcattatcggtgtaatagtcttcatcttccaaatcactctctccataacccatttcatcatcttcatcctcaaaactatccacacagttgtggtatctatagtttgaaggatacacagatctactgcttagatcctctggtttcttatctatagccgaagatcccttgcttcttcctcctttcccctcttcatcatcactgcaagcattctcatatcttgaaggtacaataggttcataggtttgtacattcaagtcaaatctgactctcttcctcgtcttcttagtcaccttcttcttctcctcctcctcccctacctcactcctgacacagtaaacataaaatagccatttcaattgataatctctgctaaaattgggtttcattttggcttttcataactcagattaagaaaaagtttcagtttttaagtaaatccaagcccctaagacattatacctgaggttcgaatttgagatcttttcagggttatctgaaacagtactgaaatctgtcggatctgaagaaagcagcggctcatagctacagattctctgcaataaaggttaaggttcaaatcagagtaatggaaaaaaacctaaactttaaagagatagagtaagaagaaagagtgttattttacttattgtggaaaattgaaaaaagcttacttgatctcgaggaaggatcttcctaatggaatttctgcgttttttgttggaagagagaccgaaacaacccataaaacatcccattggtggtgatgtttctctgtttcggtttcgatacttgagaggaagaagaagaagagagatgattagttgtttactttgttgcctcgttgaggtgttttgaaaagagagaaataggaacgttggggtttcaaacggatgaaagtgacggtgggctcacggagtttatgccgtcttttctttatgaagatgagacaaaattaattattggattccttttctatttttataacattttatgccaaaataaaagcatttatttgtttctatgcacaaccaaggaatgttgggccttgcggcccatttcaaacagtttgttgttaatgtgctttttgacttttgaggtctgtaaagacagatttaggcctacgtttatgccttttaagttcaacgttcactctaaacaagtggtgcacaaattttgatcaccttgcgcaatatgattatgaatatgtgaaaactgaaaacagcttaagttaagtttgattttagaaatgttagttatcaccaaaatatgaaaatatcaggctataactatctaagaactttcttttgagattcctcgatccaatttttatttaataggaattgttttctaaatttataattttagagtttctaataatttaattttttttttgcgacaaaaatattcttaagagttaagagaataacgttgatgactagaaaaaaaagagagattaatgttgcttttttttttttggtcacagcataatgttgcatttaagagttcaaatttgcagtactagcatctatacaaaataacatgattaattggtttcccttgtaagctgaatttgtagattacattgtattctttgattatataaattcttctttaataccacaccctcacaaagtttgccaaatgaagtgtttattatttttcggatcaatgaccttcttaacatacatttgaattaatacgaaaatgtacgattcttagcacattccacgttgtttgattttttttgtaaaattgcagatatttcatttcttccatcaatgctcgatatatttcgatgagagaagtagaaagattgctttgatgagctcgatttgagatatggtttttttgtcgattaatgcttttatatatatatatatatatatatatatatatatrawagtaacaaattttaatacaaaaaatcaaagacttaaaatgatctaacattttttctcaaataataaggtcattgatccttatataacatggaatcactataacatttataacctacattcttgctcatatatctctctccttttttttccaacatattaacgactaataataaaatttatcaaccattttaaatctctaaatggaacttattattacatgactaaaaaataaaaataaataaataaataaacgaagctgatatggaaaagtcttctctttctttttttttttttggtaagtcgatctctctttcactcactttaacccaattggccgctattttccaaagtctgtttatttttttaatctctctctcttctctctcacccaatttcacaaacccgaaaccctaattttctcgggacactgaaatttttacagcttctttcctcttcttcaccggggagatttgtcggtactaaatctagggtttttgggtatcaccggagggttgaagagagagaaaaaaactcacaatggaatcagatcagggaaagctatttatcggcgggatttcatgggataccgacgagaatcttctgagagagtacttcagcaatttcggcgaggttttgcaggtcactgttatgcgagagaaagctactggtcgtcctagaggattcggattcgtcgcattctcggatcctgctgttattgatagggttcttcaggacaagcaccatattgataatagagatgtaagcaaaaatcttgtttctcaaatgggtctttctaaattttgaatctttatagtaaaaattgatactttgaatcttgttgttgtcgaggtttgattttcatctttgatggatttaagttgtgttaatttcttaggttgatgtgaagagagcaatgtctagagaggagcagagtcctgctgggagatcagggacttttaatgcttctaggaattttgatagtggagctaacgtgaggactaagaagatattcgtgggaggtttgcctcctgcattaacatcagatgaatttcgggcttactttgagacttatggtcctgtgagtgatgcagtcattatgattgatcagactacacagcgtcctcgaggatttgggtttgtttcttttgattctgaagattcggttgaccttgttttacataagactttccacgatttgaatggtaaacaagtcgaagttaaaagagctcttcctaaagatgctaaccctggaatagccagtggtggtggtcgtggcagtggtggagctggagggtttccgggctatggtggttctggtggaagtggctatgagggtcgtgtggattctaatagatacatgcagccgcaaaacactggaagtggttatcctccttatggtggttctgggtatggtactggttatggttatggaagcaatggtgtaggttatgggggttttggtgggtatggcaatccagctggtgcgccttatgggaatcctagtgtccctggagctgggtttggaagtggtccaagaagttcatggggcgctcaagcaccatcgggttatgggaatgtgggatatggaaatgcagctccgtggggtggttctggtggtcctggttcagcagtaatgggtcaagctggtgcatctgcaggttatggcagtcaaggttatggctatggtggaaatgattcctcttacgggactccatctgcctatggtgcagtaggggggcgatctgggaatatgcctaacaaccatggtggcggtggctatgcggatgctttagatggctctggaggctatgggaatcaccaagggaacaacgggcaagctggttatggtggaggttatggaagtggtaggcaagctcaacaacagtgattgaagaagaaatactactagaatgtggttttatcgctgaccttgaaacctcctgctttccgccttaaccatgtcacgtctttggcggttagaccaggaggtggacctacgctggattatctcttttgttagtttctcaataagttgttttcaggcaattccggatactatttcctatcaagttgtagtttttaagtttgcgtgcttatttatatttgtcgctttggaatggttttctttctctgttatcctctagtgtttgtgtttaacgatacatcctccagattatcattattcatctcccttttggttcattcatttttgttgaatattccattcacagattcttgcttttgcatctcctctgtttaggggaagatgatttgctcagtgttcaatgtgatctaagaaaagtgtttggtagagcaagagctgcaataaatcactttgagattgcgttgttacatgaaggtcgtgttggcggaaacttaacagtcccaagaactttaaaatattgtcttttgtcagacaaaacctgactaaactggtctgtttggtggctgttcaaacatgacgtttctaatccaaaccggcccgtctctaaatcattttctctctcttacggtaataagttatcttctctactgcattccagtttttgcaaatcctgcggctaatctaacacttctgacatgtgagtaaagcaatacattgtagctagtagttgttttcccccagttaattatgttttaaacactcgctcagtgaaacctcttgagtttgtaatatatattttctttcaatacattagatttcgtaaccattttggaccgacagaagaaaagagattaccattatgtcttttttcttttctatatacgataactaaaagtctaaagcgtatttctcttcgtataggtaaaaatgtagattgagacattgagtagcatctacattaaagaaatatatacaaaaactggtatattgtgctggcaacaatctagtacatatatataaaagattttacagatgagatttggatggacaaaatttactcgaaataggaaattagctaattctagtgttatttttatttgtgagtattcctaattttactcgcatcctctatgattctctcaatacagattttttttgctgtagattacctttttccaacttgtcgccttcctcctccacctcctcagtttctccagttttatttttacgtttgtcttataataacacaagagatatgtcttttcctttcctctttcctctctcattgagcaatctaatttcataaaatcccgtaaagttttcctttccaccctctcccctcctccgccatgacccatcatcaccggagagagtccttctcggttactccctctaccatgggaggttccgtcgtgctttgtcctaataccgaccttctttggccatttgggaagcttgaagggcttgatcgagatgatattcgtgagacggcttatgaaatcttcttcacggcttgccggtcttcaccgggttttggtggtaggactgctctcacgttttactctaaccacaatagcaatgaccatcatggagacggaggaggaggaataggatctggtggctcaactggtgttgggtctgggtttggctcttctgggaggaaagaggtggtgacgacccctacaagccgggtgaaacgggctttaggtttgaagatgcttaaacggtctccgtctaggcgaatgtccacgataggagcggctggaggagccgcaacttcactatcccctggcggaatgaatagtagtgcgggacatattagtcctggagccggattcttgacggtccaaccttctcgtcctagaagaccgttgacatcggcagagatcatgaggcaacaaatgaaggtgacagaacagagtgacagtcggcttcggaaaacccttttgagaacgcttgttggtcaagtaagttaatcgttagcttccttcttctacaagttaatttaaactttgaaatgccttgacacaataccttaattgtttttttttttataaaaaaattagacgggtagacgagcggagacgataatcttaccgttagagctccttcgacacttaaaaacatcggagtttggtgacatacacgagtaccagctttggcaaagaaggcaactcaaagttcttgaagctggtcttcttcttcatccatcgattcctctagacaaaaccaacaactttgcaatgcgtctaagagaagttgtcagacaaagcgagacaaaacccattgacacaagcaaaacctcagacacgatgagaacactcaccaacgtggtcgtgtctttatcttggcgtggcactaatggaaacccaactgatgtttgtcactgggctgacggttacccgctcaacattcatctttatgttgctttgttgcagtcgatattcgatgtgagagacgagacattggtgctcgatgagatcgatgagcttctagagctaatgaagaagacttggtcaacactagggatcacacgaccgatacataatctgtgtttcacttgggttttgtttcatcagtacgtcgtgacatcacaaatggaaccggacttgctcggcgcttctcatgctatgttagctgaagttgctaatgacgctaagaagcttgaccgcgaagctctttatgtgaaactattaaactcaacattggcctctatgcaaggatggacagagaaaaggtatttgactattctcgttaagccaagaagtcaagaacaattatatttacaaaatgtttgaattttaatgtgattttggttattaggttattgagctaccatgattatttccaaagagggaatgtgggattgatagaaaatcttctgccattggcattatcatcgtcaagaattttgggagaagatgtgacaatttctcaagggaaaggacaagagaaaggtgatgtgaaattagtggatcattcaggagatcgcgtcgattattacataagatcttccattaaaaacgcattttctaaggtaaaaacacaaaattttatttttgttttcatttcctctctgtttttagggttctgatttttttatgttacaggtgatagaaaatacaaaagctaagatcgcagctacagatgaaggagaagaagctgctggaacgttgttacagctagctaaagaaacagaggagctagcattaagggaacgcgaatgtttcagtccgatactcaagagatggcactcagttgctgctggtgttgcctcggtgtcacttcaccaatgttatggctcgatcttgatgcaatatttagctggaagatcgtttatctcgagagatactgttgaggttttgcaaacggcagggaagcttgagaaggtcttggtgcagatggtagctgaagattcagaggaatgcgaggacggtggaaaggggcttgtacgagagatggttccttatgaagtcgattctattatattgcgtcttctaagacaatgggtcgaagaaaagctcaaggcagttcaagagtgtttatttagagcaaaggaaactgaagtaagttttagagattttacttgtgatccaagaaacattacttcatctaatggtgtttgctttctatctttgtagacgtggaacccgaaatccaaatcagaaccttatgcacaatccgcaggagagttgatgaagctagcgaaggacacaatcgatgagttcttcgaaatccccatcgggattactgaagatcttgttcatgatatcgctgaaggattggaacaactttttcaagaatacaccacatttgttgcatcttgcggtaagcaaaacatccaaatctgtataccgcaagaattgaatttgttatctctaattcttgtcttgttcaggagcaagacaaagttacatccctacattacctcctcttacaagatgcaacagagattccagattcgttaagctatggaagagagctacaccgtgtactacttccaacgaagaccttaaatacaccacatctgtcatatccgacggccaccatccacggccatccacaagccgcgggacacaacgtctatacattcgtctcaacacattacatttcctaagctcacatatccactccttaaacaaaacactctctttaaacccgaggatacttccggcaactcgaaaacgttaccgccatagaaacaacaattcatcttcttatttcgatttcacatacgctggaatcgaatccgcttgccaacacgtttcagaggtcgcggcttaccgtttgattttcctcgattcaaactctgttttgtacgagagcctctacgtaggagaagttgcgaacgcgaggatcagaccagcgttacgaatcatgaaacagaacttaacattgatgtcagcgattcttgcggatagagctcaatcattagcaatgagggaggttatgaaatcatcattcgaagcgttcttgatggtccttctcgccggtggatactcccgagtgttctatagatcggatcacagtattatcgaagaagatttcgagaacttgaaaagggtcttttgtacttgtggtgaagggttgatacctgaagaagtggtggacagagaggcagagacagtggaaggagtgattcagcttatgagtcaaccaacagaacaacttatggaagattttagtattgtaacgtgtgagacaagtggaatggggatggttggttctggacagaagctacctatgcctccaactacaggacggtggaaccggtctgatccaaacacgatcttgagggtactttgtcatagaaacgaccgtgttgctaatcagtttttaaagaaatcgtttcaattgcctaaacgaaggtgaactggtaagaagtaagaaaggaaaaaagaaaaattcaacaaaaaaatatgttggtgttggtgaaggatgtgaacttgattcgttgtgtaaatgggttaaaagtatggttttcgagtttttggggctgatttgtaatctaaaaattgttgcattgaggttgaagagaattgtttgttgttttacgaggaaaatattcgttaattctttaattagatgtgttcagaaatagaaagtctttatttgtttaagaaattgtaacaagttcttgcgatgatgaaaagaatgagatttaatgggctttgagcccaactcatgtaaagcctttatagtatataagaagataaaaattcgaagataaaaaccaaaaccctatccactttactctaaacctccattaccttcgtctttcttcctcagtcgccctacaatggctttgcctttgtctggcacgcgccacctcacgcgcgctctcctctctaatgtcactcttatggctcctcctcggattccttcctctgttcactacggtggatctcggttaggttgttcgacccggttcttctcaattcgatgtggagctaaccggtcaggttctacttactcgccgcttaactctggctctaactttagtgatcggcctccgacggagatggctcctttgtttccgggatgcgattatgagcactggcttattgttatggataaacctggcggggaaggcgcgactaagcagcagatgattgattgttacattcaaaccctagcgaaagtcgttggaaggtataatcttcagattatatatgttaattgtctaggttgctgttgaaatataatgaaaaatgtatgaaaaaatctagggcagaaaattctgtttactttgtgtatttgactctgtatagtgtttgttgttggtttttggttagtgaggaagaggcgaagaagcgaatctacaatgtttcatgtgagaggtatttagggtttggttgtgagattgatgaagagacatccactaagcttgaaggtctttttacttagaacttgtttcttatgtttactatgtgttaactgataataaagaagagtattcttaaagtgttactttgtttacaacaggtttaccaggtgttctgtttgtgcttccagattcctatgtggatcctgaaaacaaagattatggaggtaattgttctgcctactattcaagtttaacctatatgtttgctttatttctccaaatgaaatctttgctagtgccattgtcattgcaaattttgagtcttagtgtgtgcctctcttgaaacatgaaggaaatatttttataagtccatcttggcaaagctaatgagtcttttggctatgattagctttgaatgctaatggactgacatcgtctattttctcttaaccgatttgtgcagatagttaataatatatctaactgcagtctggtttagatgaaaacatatattgcatgcaactctagagtgcttttctcttggaacgtgaagacgtgttattgattatcagtccatcttggcgaagctaatgagtctttgggctatgattagctttgaatgctaatggactgacatcaaataatttttatctaagccgacttttgcagatagttagtgtaatatctacctgcagaccggtttagataaaacatacattgcatctcctgagtgcttcttgtttcaattagtccattttggtgaacctagtgaatctattggctctgtgtgcgcactaaattaatgacatgaccagttgagaagataaaatatatacgcactgatagtatctgtgtgtcactctccctagccatgtaaaagatagttcaaagttcatcttggtaaagttaataattcttttttagcaatgtttagtttagaatgctaatagacttgtatcagtttcttcacttggtgtatgtgtggattttgaatagcaacatgattaatttcctggttgagaaaaagtatatatgtaaccataataacccggtatagagatgattggaggttttagtaaagaaccatggaccagaagtccttcttggcaaagctagtagctttctgccatttctagttttgaatgttaatggactcacatccagattcgctctttcttgtgctgtgctctttatattgaggaagcatggactcaattacgagagatacaccagctttacatttctcaaattaaatctcaactatacagaagaacatttactgtgatcgaattctgatttattcttaatcgttgtcgttgacttgcagctgagctgtttgttaatggagagatagtccaacgatcaccagagaggcagaggcgggttgagccacagccgcagagagcccaagatagaccgagatacaatgacagaactcgttactctcgccgcagagaaaacacaagatgaactgtaactgaagatggtatacatacacctaagctaagccagtatgaggatgatgatgatgatgatgataatggtggtgaggatgatgttactgccgccacacgagggctctgtattccagtccgttgcagttaatggaccgggcttactttggatattgttgaaattctaagttttgtttctatgtaacaattttatttaataatgtaaattgaggtttcactgttttaggaaattactttgggtagaagattagttttcttttcaagaacaattcatgtgggaaatggtaaatttattttagtaatcttttagaatgctgaagcatgctaaaaagagacgattactcttgtggtcaatctgtggaaaagcaaatacaatttggggttaaaaggaaacaatgtcaaaataaaagggcgatctgatgatatctccaataaataaggggaaaatgaaaaagtaaacaagttgattttaaaatccagcggacaaaatctgatgtgagtttttttcttttaatctctcgtccccgaaaaaaagttgacgaaactctctaccggaggcgctagttttcgccgtcggcgaggcaatttaactttccggaggtgcgacgcttctactccgcttatttttttctgctcttgttatttctcgtctcatgtcaagcttctttatgccttctctttgggtgtaaatagttggattagtcgcgaaaaaatcacgattggttcttcatttcgatgtatattagggtttgtgtgagcatatgattgctgagaagtagctagtaattgaatgtttatgtggttagtgggtaggagaatgggctgtggagatatctctactctgcgccgtctagttctttaggtcgtggattacttaatgcgattagattcaatcggatcgtagttctgatctattcgttcatcttgaagtttctagtcaagtagttaggaaatggtgttggtttttagaggcgcagtcactgtttcttgtacaatcagttaaataacttgctttttctggtggttaggagcttgttaaatgtgatcgaagatctatgatatgataaaaaaatctggaatagtattgtgttggtaggtttctgtttctgtgattttggctccatgtatcttgtaattttgaagttcctggtaatgatttctatgttggacgagggagtggaaactcatgaattcagctgtgcattgccttataattgtcttttgttctcattctattagtttgtgatttatgtctgctgatgattgtgctctctgctcattatctcaagggaataaagcaggatgaacgaagttaataagcaaaaggaaaatcgtgatggacatgaaacacttgtaaatgaagaaggatctgctgctcgaacaagacctacaagtgttgaggagattaggctaaggaggaagaggaaagagtccttggaaaatgtgaaggaggaaactgtaggagcagcacagttactgggttacgatcttgttgaaaaggcttctgactatcatgagtccaagaatttgaggcgtgaagaacatgttgaagacagttcaagaaaggaaaaagaagccatttctagatgtagggaagaaaaaatagaaaaaccaatgaaagaggaccctgtgggagcagctcagttacccgataaaaatcttgttgagaaggttcttgactgtcatgagtctgaaaaagggtatgatagatccgagaaactgagtcatgaagagcttgttatggacagctcaagaaagaaagaagaggctatttctagttctagagaagaaaaacttgataaaccaataaaagatgatcttgttggaacagctcagttactgggtaatgatcttgttgagaaggttcctgaatatcatgtgtctgaaaaagagcatgatggatccaagaacgtgaggcgtgaagaacgtgttaaggacagtttaagaaagaaagaggacataacttctagttctagggatgaaacaccaatgaaagaggatcatgtgggagcagctcagttacggggtaacgatatcgttgagaaggtttctgacaatcatgcatctgaaaaagggcatgataaatccaataaagtgaggcgtgaagaacatgttaaggacagttcaagaaagaaagaagactacatttctagttttagagaagaaaaatcaagaaaagaggatcatgtgggagcagctatgttactgggtcacgatattgttgacaagttttctgactatcatgcgtctgaaaaacggcatgataggtcgaagaaagtgaggcgtgacgaacatgttaaggaaagctcaagaaagaaagaagacgccacttctggttctacggaagaaaaatcaatgaaagaggatcatgcgggagcagctcagttactgggtcacgatattgttgagaaggtttctgactatcatgcgtctgaaaaagggcatgatagatcgacgaaagtgaggcgtgaagaacgtgttaaggacagctcaagaaagaaagaagatgccacttctggttctagggaagaaagagtagataattcaacgaaagaggaccctgttggagcagctcagttactaggtaacgattttgttgagaaggtttctgactatcatacgtctgaaagagggcatgaaagatccaagaaagtgaggcgtgaagaacgtgttaaggacaattcaagaaagaaggaagaggctatttctagttctagaggagaaaaaccgattaaagaggatcatgtgggagcagctcagttactgggtaacgatcttgttgagatggtttctgactatcatgaaactgaaaaagggtatgacagatccaagaaattgagccgtgaagagcgtgttaaggacagttcaagaaagaaggaagaggctatttctagttctagagaagaaaacctagataaacaaaaaaaagacgagtctacttcaaatagaaaaaggaaagcagaaggagagtgttctacagctgaaacagaatcaattgaagaacatagtaaggatagacgaggaaagaaagaagaaactaattctaattgtagggaggaaagacgagataagaagatgaagaaggaagaccttgcttcaaacagaaaaattgaaggagaaatccctacaactgaaacaaaaacaatgacagatagagatgggctttgtagtaaaaagcgtcttagaagtctagttgtggcagacgtacctcgagatgaaagtagtataaaacctgacaatggagacaagagaaagaatcaaaatggaaatcataagaagaatagggagataaatatgtcaaagaggcatgatccaggaaaagtgcacagtgttgaagtttcagagcgatgggagagaagggaacaaccaaaatcacgtcaacgcgacttgagagagaaaagaaggagatcaagaagtcgagatcatgggcaggacagacagaaaaggtcatcccccttaccaagggctgaaaaggctacatcgcgtcataagagaaaccatgaggagcgatcggaaaatgttgtcaaagataggtcgggaaaacatcattgtaatgataatgaagacaaagtgacaagcactgtaagtaacaagtctagacggtatagtgcttccaaaagtgaacttggtggatattcaccacggaaaagaagggagcaagcatctaccaaggctgcatctccacctaatctttcttccgagaaaaaaagtgctaaatggggtcttgcagctactgtaactgctggcatgttttcggactcagtattttctggtctccaagcagcaactcagacagcatatcctaccatcagtgaggcttccttgacgcttttgaagccacttatggttatggatgcgccttttaggacgccaccggcaaggcagaccacttcattcgattctgttcaactgacagaatccaccagacgtatgagaagactttacgcagaaaatgtgcctgattcggcctctgagaagtctctgattgaatgcttcaatggctatatgttatcttcagggtccaatcacataaaaggaagtgaaccatgtattagctgtattgtaagtttctgtcatgtgacttccttattcatatcactcttgttatgcttgtgaattatatcacctgatagtatttgtcctttaaatgcagataaacaaggaaaaaagtcaggcgctagtggagttccttacgccacaagatgcctctgctgcactctccttggatggctgctcctttgcgggttcaaacctcaaaatccgacgccctaaagactatgtcaggacaacagtaagaattgcaatttctacaatctctctctctctaaaactcttgctacttgctccgcatgttttatcttctaatagtcatctggttaattttgcaagctagctcaaatatcggcaatatatttctctaggtgtcatcagtaagattcaatgtttccactttcagttcagttgataacatgctactgaaacctgtgtgacttctttttaatgatttaagcttgaatttattgtgttatatgaccactgtccggtgtaagtttatgttacattatttacaagtcgtgagcatcagtcctcttttgatccagatagatatattcaaagtagacagacataaggaacttagcaaaacatctgtctctatattttagagcacataagcatggtgttgtataaccaaattctcatttactgataacttttctgttgaagattatggttgtcttctataatcagaaaaattaggagagttcttattatcatcgattcatgtatgattcagtcttagatgcccatactgtgccactccttaaatgtactatgttggaaccaaaaaatgctcatggtcctatctttgaaggtagtctcaatggaagcatattgccacttttaaactatgtattgcaacttgagagtttgataaatgcaagacagtactgttgatgttacaactgttagcagatttgttggtaaacatatggttttgcgttgcttcagtaagcttaaaaccttagccatttttcaaaggatggccctctgagaatagaaatttagatatcgttgaagtaaattcatcatggttataggaaaagaataaatgaatttctctgtatttgcttgatgtttccatcacatgattctcttgctgggttgtgaagtccaagcgatttggaatttgcaaaaaggcttgatgtgttgaggtgcaatcttattatttatttgcaattggttttgaaggcttctctgtttttttcccgtgccattatcataattaatactgacaataggtgtcactaagaattagtgtagtttatggattcctgcacttgacatgatatgttttcaagccacatgtcataccgttatctgactgttgtgtgttggaatctcttaaatagggtgtttatgttgggtatgtcataattcacattcaggagggtgatgacgctgtctgctaaataagaagactaccaggtgtagtgaagagtttgttgtcttccaagtttgtttccattcttcttctcttttttgggcttttaggaattcatacagataatccatatgattcctgtgtgatatggtttaccgttcttgtgttctttgttagttttgtctaaatatgttggtatcagatgataccatatcaatctttttttttatctttgatcgtctcctaactgaatgtggttgtagtaatacctttattcatttatctgtttggctattactgtgtttcattcctcagcaggatcagatacctggtgttgattgttatctctattctttcgtgttggcgcgcctaagaataacatgaataccctaaactcttaccacctcctcttagatcctcgttcgggtctaagcgagcgaggattttttgcctttgtccttcatttttgatcagttcttactgtgattttcggctgagtagttgtaggaaagtctatgaaaaatgactgattatcaaggctgtggactttgtccttctatttggccttgtacatcagtaccatgcattttactatgatttctgagctatgttatggttaccatccatgaagcaggttttcagacggttgctattttcatgcagaacggtgaattggagaaaaaagagccagccgcaaatgcagtaagtgacaacgtggaggactcatcaaacaaggtacaaataattgccctaaatttgcttcttacgacagtgggtaaaactttttatatcgaaaatgagtgtagagtgtcttttaaatatctcttaacgtattcccttttgaaagtactgtaattgtatatgtcagtgacccttggtttatagttcagatcaaatttttagtttgtgccatagtttcgataccactgtaatttgtaatctcttgctctagagacaaaacatcggtatttctaaatttgacttggtcctttccattcatggttcatgatgtggggcatatcttggaattttgttgcatgtttttcatgctgacagcttttatatccttttccgtttaattgtctgtcagtagaatatcaattttgttagagttaacaacaaaggaataaaacatgtggctggatcaacttttttgtaagtttggctggtagtaggtgttatgatcaaaagcttgttcatagtggttcaacctggaaagccaaatgtcagaccaccttattataatcttaaagtgaaaaacacgcagagaatagaagtgcagttctctccgcagctacggcatctttgtggttgataatgttgaaagcttcactgtatttgcttgctatactaatttctttttctgtcaagcttgatattgagcctagtgtacttgttgcagatcttcattggcggattttcaaaagctatttcatctgaaatggtatgctgaactgtaattctttgaaaacatttgacacgttcaatcttctattgtccccatttctatcgtttcaacttctaggattgtctgattcctctttaacgtttttccagcttatggagattgtcagcgtctttggacctttgaaagcataccggttcgtgagcaacaatgatctcaatcagcgatgcgctttcctagaggttagaatgtacttttatttgtggccaagatacccccatcttagtctgccatctcgatgtagttcttgtgattgtttcatatctttaatttttcattttccgggtagcatgggaaggtgttattaccttgtaacttttacagagtaaccatgaatgtgactgtagttccaagtatattcatattaaccagccctaactctttttaaatctctatatttcagtacactgatggatctgttaccctcaaagcttgtgctggtctaaatggtatgaggttaggtggcagtgtaataacagccgtttgtgcatttcctgatgcatcatccgtagcggtaattcagtgacccaactttgctttcgttagttcatgttgtgtttgtatgggtgacattgaacagaaattcctttagttacttgtgagagtggtgtgtgtacgtaatatgtgttgcaggtgaatgagaatccaccattctatgggatacctagccatgcaaaaccacttcttggcaagcctaagaatattctaaagctaaaaaatgtggtaagcataattggtgtatcctttttcttgtgaatctttcccaaataaactatgtgaggctatattaacattccattctttcttgtttgacaggttgacccagaagatctcacgtcgttttccgagcaagaagtgaaagaaattttggaggatgtacggttagaatgtgccaggttaagctctgagatcatcttcccatgagtccattgagcttttaaaagctagtaaattaagaaaataggcctctgggtcttgtcatgatgcaggtttggggttattaagtcgataaacatcttggaacacaagagcaaagatatcactgtttctgaaacaaatccattgttgaacttagaatcaactgattctaaagaaatgaatgtgtcagtgatcgaggagaaagatgaaggatccgagaaagcggaagatattgcagacaatgtagatcttgcagaggttgtcatgccagacagtttgacaggtgaagacaagttatgtgaaccgtgctcggatactgctgctgaaacaagcactcaagaaaatgaagatctacactccactgaacaagagcattgtgaaaagattgttgaagaaagtgcgcaggccgaggcagagaatccacaagaagtagcatcagtgcgtaccgtgaagacaagatgggatgctggcgacaagatagaagaagaacaagaagaagaccccgaggatgtatttgagacgggttgtatcttcattgagtacagaagaccagaagcgacatgtgatgcagcccattctttacacggaaggctatatgataaccggattgtgaaagcagaatatgtttctaaagagctttaccaaatccggttcccaagtgggtaaataatcccacaacaagtgagactctgtgattcttctcatctttaccacataaccggttcaaaccgagttcagagatacatagcatctacaatcaaaaacccttcaaaaatctctttgtaatcgttgggattgatcaggttggattattcatcaccacctgtgtctcgttacttttatgtattagagaatccaagaagggaaagatgaaaccatactattgtgttggtggctatatggaccggtttgcttactgaaaaattgttgtgttaaaagagaacgtaaccttctgaatgagaaagcgtctttcattttctacaaaataataaataaaatgaacccaatctccttctttatccaaatcctccttcgaagcagaagtaacagcaaccaaaaatgacgacaatggcgacacaaggcgcttggctacgaatgacctcatcagccaagtccatgaccaagtcaaccgtgacttcaaaggagcttggattcctcacctcccagctcagcggcttaagaatctcatatactcccagtgacgtcatcaaccgtatctcccttccttcgttccccgggattcagccaatcgtcgcacgtaattccccttttccctttctcttagggtttagtcgaatgcattggcgtactaaatttatcttgctttcgttttattcatgtcgaatttcgaatctctgagttagcaagcttgtgttgaattgtctggaactatgtctttgcttttagatatgaaaatgagcagtgtatttaaaacccgtagcataatttctcgtattaaacttttcctttgaatttgatgttatgttaaaaaaattctccaaaattgaccacatttatatgattctgagcattgggcaatttgctccttttttcttgaaactgtgtttttgttttccaaaatgtcaggtagaatctgcccttttactgggaagaaagcaaacagagcaaacaaagtttcattctctaaccacaagaccaagaagttgcaattcgtcaacttacaatacaagagagtttggtgggaagctggcaaacgttttgtcaaacttcgtttatcaactaaggctttgaagaccattgagaagaacggactcgacgctgttgccaagaaagccggcattgatcttcgcaagaaatagatatgatgatcgcaaagtttattatatacatttcttgcttctccttttgcagtactcgtacatttcctttctagattttggtaagtatcaatggaatctctgagttgttgtatcagacactgtcaagaaaagactttaaagagaaacgaaaacaaactctcacttgcaggtggctcaaataatacatttcatggttttgtttatgtttctcagataatatcgttacaggttgtatcaactgaattctcgggttttccttttgaagacttcttaatcgaaccttctcctcctgctgatgatccttttagtttcctaggacgcgatgtagccttccgtggaggagctgaaccatcaggtatttgattaggaacttctgtgtctggagccgggataccaccacgccttctgcgaactgatggttcttgatcattcgatgagtctgttgacccgtgtgcgcttcggttatgtcttgaatgctttgatggttcatctgatgatgcagcatttccgctactttttctaggcggagacccgttatgatttggagaagctgctcctccgggtttccgccttgttttctgtttcggtttctcgtttgtgttcgaaggcagtaactcttttagcccggctccacgttggttcgtccctattgagatacacatcaattcctcgaaccaatccagatttgttcctcaaagcttaacactttaagggaaaaggaaaaacacactttgcaaaaataactaaccttgcgggttgtatttgttggaatttcccctggaaacgacttgacctttctcatgttcttgagttttaaagtcattcatctgcagtttttgtcccataaaaaaacaataatgagcacagatacgtgtgacatgtatgaaaatacgtataaatgtacgtatgatcttacccagcttggtgtggtgttggttggaccgtcggagccaatgtgggcaacatgctttacatcggtcggaaatcctatctgcatctcctgctctttctcttcatctgcaatagaataattacatccaccatgtaatttgacttttgacacaagaaacacaaatgatttttcatttttttcatgtttatggggaaaatgaatgagactcaccaaaaatctgagtaatgtaacgaaggcccttaagaagacccttcattgtcgtcgccattggtctataaagggttggttccggctaatgtgtatccacacgccggatacaacctttgtggttcaagatttgacgatcgttaccgtaaacctaacatgcagaaaaagaaaacgaagaacaaatcaagaaaaaagttgtaaggcacaaacaaaaaaacaacagagaatataacgaaatctgaagacttaaaccttgaacgcatggattttctcttgacgagaaaaaaaaatgttgaaatgttttgaagagagagagagagggagggagggagagagagaaggatcgagagatctccgaggagttattggttaaagatcaacagaccaaaaagaagaagaggaagagcactaagttttgttgttgttttaacagaggataaaaaaatttagaaaagaaagaaatattttcatagttgtaattaacagataattttataattagattgttgattggtaatggaggcaacgtagagctattatcaaagggaaccctcctttgggaaacaagttgtcaagaggattttccgggtcgaatggaaggagacacgaccacaccaatttcttattttactaataaacatactctaatgaaatctaagatagtataaagtattatttagagaaattgcatagattgcaaatactgaaaaatgtgatatctgaatactaagataataattgagagattttgcaatagtaagcaaaatggtttgaactttgaagcatgagatttactatcttaaagactttacattattttttaacaagttaaacattattatgttatgtgaaatattttgaaaataaatttcttagattatgaaaagaaagattcaagttttcataacaaacattaacaagaagagttgataagattgattcgtatgttataacttgtaatataaagtgaacattcagatagaaaccaacacattattctgtttctttttggaggttctataattggaaggagaaaagttaaaacagacaaagattccggcaaagaagatttgataccggcgataatcatatgatgacttaagaagctttcatgtcatccataccgacgctagcctgccaaaaagaaaacaagaacaaaataatcaaagcctgtgtgatgaaattgaagaaagtgtaaagactcaaaagtttttaaagtctttgtttaccagaaacttatgattatcatgaagaaacggaccaaactcagcacaaaacctttccatgtcggcttggatgttaccagaaccagatatgacatccatgaacttcttcctgtccggagctagctttaaagccatctgataaaaacaaagtttaccgtgtctcaggaaatcaaaatgagattggtttgcagaatatgctgattacacagagaagcactagtgagtacatacagagaaggtagagctggcgagccatccgtgccatttcttgagtgttttttggtatgagtcagcacaagcttgtggcattgaccagtcttgatgtgctaccaagtttcggaacagctccactaagaaatccattgctctgaaagattcactcataggtgatatatatggttttgagaagctgctctcttcgaaataaaggtgtgtattgttgacatgttgtcatcgtttacctggttaaccagagaagaccgtttgtacagctagacgatccttttgctatcttagactcaatttcgacttgaacaaaggtgtacaagtacttgaacttgtcgggatcagataagtagttcttctccaacctctacacaagagacggaccaataaagttatattgtaagaagacaataatccaatacagagaggtcatatcactactacagtctacaggacattttcactagcctattctccgccatcagaggtacacattacaatctaagaagagcgagaaaaggggcagacaatgcatttttgtcagtagtttgtactgtgaatgtaaaatagatttgtgctattcgattatcaaaggggcagacaatgcattttttaccgttatgttgccaccaatgtcagatttcacgagagtcatagcagctccaaatttatctggaaaatagataaccacagaaaaatgaagtcatcatgtaggaaacacaacatttgtgttacataggaaaaatgaacaatcacaagctatacgtgaacttcgaagttttgaagaacaaggaacaatcacaataacaaatgtcaataacctcattaaaagtattaagacagacaaagaaacaattagaaaaagcttctccctttattacctataacaggcaagatggtcttgcaaagctctaaaaatggcttagtaagcatctcgccttgatcagatttgacatgcttcattccttccaaacaaggcgtgaacacagtcccttccattttttcaagtttgacttatctgaatatgagatcaaacactgaagaatgaagataatcaacattaaacaaacccaaaactgagaaacaacatgaacaacactgagaaacacattaactcaagcaaaaaggtaatgaattgaatcaaacatgaaagtcactttgtaaaaatgagtcagctccataaggaaaattgaaacagccaacaatctctctacacatgcagatatagaactatttaaatcagctccattacagtggaaatccagaacaagaatcataaaaatggcatcaaccgaatcgatacagagatctaatttcaattggatccaccaatcaagcaagagcatcaaaacagcgtgagaagaaacaataaaacaagacaattattcgagatctattgattcaatggacgagaatgacgaatctaaggctgatctctaacggggaaggagaaagatcgtacctttgcctgagaattgaaaaaggtgggatggatcagattctgctactctgggattgtgttcttcgctctctggagttagaaatttctctttctctttaaacggctctcgttttagaaaataataattgtgttaaacgcctaaaacgtaacggaagtttctgaaaagccctaacatttagtatctttcaattacacccatttcatagaaaatgtagaaaacacacagttttattacatgcttgtcctgcggaccggtcctgacatatgaagttacatttgttgttgtaggtgtttcatcttgatatatgagattctcaagtggataaaatttgaaaccaaacaaggctttataccgaatttttttagataacaaaataaaaagtgaagagattatgtcgggtcagttgggtctatagtactcgagtattgccacataatagtttccatttcgtttgttgattttccaatcgcttggtcaaaactttagcatgttagttcattatccatagattctaggggttggtttgttttcatctaattaagaccgtaactcaaataaaatgatagttcactttgataatattttgtgaaattgtaataacctggattagtagaaatatcctggattagtagaaatataaacgagtaattgactatcacaataaagcttaacaagccgagtgagtaacaagtatgagcaagtaaagtatcatttcttgacatgtaattttcatttttcgtaactttctctacaacccaattattgaccgcaactaaaaataatattatgttgagacatacaacaagaacatatggaagagaaaaaaaaaaaaaaaaaaagtcgatatggatttcgttgacgacaaatccacattgtattatttggacaagagacatgacctttaccttctcctcacgcaaccggcatttgttgaagtctcccattgtccctcctttgggccctacctttaatgccaaactaacccattgtatttggtattctacataaaagttgtacactaatgtacgatacgattcaactacattaaccgtatgttaaattatatagtattcacttgttgataaataaattatgtttgaacacaacaaaacttagtttctatatccgctgctgttttgttatagtcgtcattcgtacgagtaattctttatgttccgcactaatcacgcttcttttgtaccacttagtatgtgattttctcattcgtggtctttgaattgtattagaggcaatttagtcttttgtgagattaggaggtgtgtacggaaaagtgtgtgagacaaatgaagttaatgtggaggagatctatagtgggacaaagcaattgaaagtcgctttagaagcaactaaatgccctcttgacttctccattctccttgcgatttacgcatttacctaattgcatcttttacttgtttagcttgttaagttcttctacaacattaccacttttgctctcttaagttattgcaacttgacaatttgttataccctttatcaaaaaaaatacctggcaacttgtttgagctcctgaattaatcacatctcttaaaagacgttttgcgagtataacatgagcttttctttttatagattcattcaccaatcaaatataaaaactataacacaattaaaatgccatgtagctaggtatattagcaagtcgtagaacagaaatggaaagacttgatgaaagcacgtcaattcaatttcatctcctataaataaattgttgtaggaagccaaccgttttggaatttcttttctttcgttttacgtaagactatatagattcaataacgtgttggtttagaaacccatacttataatggttgacaaaaagaagaaagaaaaaaatataaacatatacgctaaaagtgtttaccaaataacagggttatgtaatttattatctggattaggaaaagatgattggaccatgcgatggagtagaggaatctgcagggcatttgtcactttcatggaccccatgaaatcacatctcttttaattgaataatcgaaatccagttgcatacgcatctttgtctacgattggtcgtagcacatatacgacatatgccataactacaaactaacttaatcttctaataatattgttaacgatcgttaatactaaaaattactaatatattagtcgtgttatctatgtgttatgaggtgtgttaattgttgatgcataatgaatgaacatgatctctaatttgtttacctcacactatgtgattcaagggtggaagtcgttggttagcaaacattagtgtctcaggacaagatagctcaggacaagatgtccgagcggttcagaatcagtaatgtttttttccggagactctactcgttgagtttttgcttgtactccctggtgtttgtgttgtgatgtagttttgttgttttacttagtttttgatcttttatgtaatttgtatttcgctgtaacttcggtaaaaaacttgtgaaaatagtataagtacttaacattgatacaaaaaaaaaaaaaaaaaaaaaactcatgaggtcttgttatatatatggtgatcacatctttaaagaaaatgttatagtatttgttttagtttaaacaattttttatgtgccaaaaacattattaaaaagagagcaataccctactctaaaatagtaaagctaccaaattcaattcattacgacatggctcaaaagaaaaagtatttcgaatattatacgatatcaaccccattatcattgctataaaataagccaaactttacctctccattttcaataatctctcatcttctttcgtctctctttctacggttcaaacattaaaaagatagatggagaagaggagctctattaaaaacagaggagtacttagattaccaccagggttccgatttcacccgaccgatgaagagctagtggttcaatatttacgtcgaaaagtaaccggtttacccttaccagcttctgtaataccggaaaccgatgtttgtaaatccgatccatgggatttaccaggtacagaaattgaaaaatctactctagggtttcattcaaattcaatatttgatggtgtatatgcatgatgatcacaggtgattgtgaatcagagatgtatttttttagcacgagggaagctaaatacccgaacggaaaccggtcgaaccggtctaccggttcgggttattggaaagcgactggtctcgataagcagatcggtaagaagaagcttgtcgtggggatgaagaaaactcttgttttctacaaaggtaaaccaccaaacggaacaagaactaactgggttcttcatgaatatcgtcttgttgattcacaacaagattcattatatgtaagagaatcaaattcaaataaattagattcatcaatcagttggataaaaacttggctaaaaagtgtattttaatgtgtttttaaaagggacagaacatgaattgggttttgtgtagagtgttcttgaagaagagaagcaatagtaatagtaagaggaaagaagatgagaaagaagaggtggagaatgagaaagagacagagacagagagagaacgtgaggaggagaacaagaagagtacttgtcccatattttatgactttatgagaaaagacacgaagaaaaagagaaggagaagaagatgctgtgatttgaatttgactcctgctacttgttgttgttgctcttcttcgacttcttcgtcgtctgtttgctcaagtgctttaactcacacatcttctaatgataatcgtcaagaaatcagttatcgggaaaataagttttgtttgtttctatagattaacaaacttgggaacaacttctattaactttaataaattagattatgattgtttccaaagttaattatgcaatccaggagtctttcttggttttggtaattaatagccatattttatagcttatctaattgtatcaaatattgaaaactggttgatcaaatatctaatttgttaatgagtgtcaattaacaacaaggaccaaccatctagctaacaattcaagcaatcaaatcagagactaacactacattaaagatcactcttacaaaaaaaaaatgtggaacatttttttatagaaaaaatcatatacccaaacaacacaaattcatttattttgatatctgaaaaagcattatatgttaaaaatagaaaatgcataatgattatttctttcaattgttgggttgtttctaagtttttggacaacacttttttacccatactgtaaaagatcacaacattgataagaaaactctcatgtctggttgaaataaattagtaaaaggttagaataaattggtttaaaggtaaattaatattttagttttggcacaaattaacaaatcaattaatttttgtttatttttaactaaaacatcattgattatctatctatatccgattcaaccaatataaaataatttatcaaatataaatcacccaaaatcaataataaactagataattttgcaatggaagtcgaaaacatcatctcatttaaaattccaaaaaatcaaataaaggaatattaatataacatagacaatttagtatgattttggttttagttaaacatatctttgatcttcaaattttttttatttttttttcggtttgattgaaacttacttttatagtttgattttcagattgattaagaatgaatcggtttgataaaactctaatgtaaatggagtaattattgtaatattcaaaagcctaaaccatttgctgccatcattaattgcacttgctgacgtaattataagcgagaataatatgatcccaaaaagaaaattgataaaaaggacgaaagagaatcaaagagacgacgaagtcaaggatcaaagccttaacttttcctctaaaacaatcgcttttttatttttctaaatttctctctgttcttttttcctctggttttgattttttcctggcattattattagggtttttttcatacgttgttgaaaatggcgtagttggagaaaggagacgaatcgatcatctacctacttgcccattctttgtcgtcgtttttcgattttccttgattcgccggagaaatagcgtttccggcaatgaaaacctctctccgacggttacgaggtgtgcttcacaagcatgaatctaaagaccggagagatcttcgagctctggttcagaaagatgagcttgcccaagcttctcaggtaccaatctctatctcaccaattcgaatttggactgttttcgttttttcgttgttagctgtttgatgatgaggcgattctcaatcatatcgtcgctctaggtggaattagtttccaatttaagtttagtgacaatgatttaggaaacggtgatgattcagatattcacgaaaattgtggtggatctagagcttcctcgatttaatctgagcttctctgtagcttttacgttttctttatctggttaagttagatcgtctctttcacttgaccaacctaattgaaaggtggaaggtgcttaggtgtttcaatttactgctctctgttttacgatgagattaatgagatgttgatgtaactggtctcacattgtttagcttgtttgttattttcgcaggacgtagaagacatgagagattgctatgatagcttgctcaatgccgctgctgctactgccaatagtgcttatggtaatctattgttccttttcctttgttcggataaaagtaacccagctaacttcataactttactattcagaatggtggtttttcagtttgatgtattcttaagtttagatttaatacttgtagttttgcattctcattttactggttcaaacgcataggtctattattgaactgtattgaaccttcagttataactcttgagtgaatctcttgcatcccaatttatggagagaaacatcttcttgttaataaatatatattcttatcatttgcagatttcgtttgcttgcagaattttctgaatctttgcgagaactaggtgcttgtcttcttgagaaaactgcgctaaatgatgatgaagaaagtggtaagaattttttgagtctttgtcaaacagattcgttaaagatatcatattatatctcatcttaatgtttaaacatttgaaaccgacagtttgtgcgtttatcccttttccaagttttctacacatttctgataagaaacattttgcttctcttattcttatgcaggtagagtgttgattatgctgggaaagttgcagtttgaattgcaaaaacttgttgataaatatgtgagtttttgagatctggtacaaactgaactggtttaatattttccaactgagttttcctttgtctaaccaccaaagaaaaatcaattaactatttatattgtttattcagcgttctcatatttttcaaacaatcacaatcccctcagagtcacttctaaatgaactccgcatagttgaggtttgttcaaatctgccatatctatttactttcgcaaattgtcagaatggcccatccttgctgcgtataaatgaacttccatgttgacagaacgagatttttaagcgttgtttgataagcttgctgattcagccctttcaagcgacgataataatgtgttttagtggtggtttatgcaggagatgcagcggctttgtgatgagaaaaggtttttcttgcctcatcttcttattcatttctcaacacctattagtgagacatgaaataatatcttaaatgtattaccttactataattgaaataaagaacttaacgttacacctatattttgttcagtttttagagatacatgagttttgcagaaatctgattggcctcatgaggggattaccgttccatagttattaaattatctcctcctatcaacatgtccttatatcttagtgggcaaaaagtattttattcaattattcatggaactcttacctttcaggaatgtttatgaaggcatgcttacaagacaaagagagaaagggagatcaaagggtgggaaaggagaaactttttcgccacagcaactacaagaagctcatgatgattatgaaaacgagacgactttatttgttttccgtttaaaatccctgaaacaagggcaaacacgtagtcttttgactcaggcagcaaggcaccatgcagcacaggtttcatcttgggctgtttttcatctttctgtttcgatcaccagagcactctgttgatatcacttttttgtgtggttttgcagttatgcttcttcaagaaggctcttagttcccttgaagaagtggacccacatgtacagatggtaaccgagtcacagcatattgattaccatttcagcggattagaagatgatgacggggatgatgaaattgaaaacaatgagaacgatggttctgaggtgcatgatgatggagagttgagttttgaatatagagttaatgacaaggaccaagatgcggattcttcagctggtggctcctcagaggtgatggtttcatatgtttacggttctgatgatatttcctgtttatcctttttagtgcattggttatcactaatagaatagtgatattcgatgttccaatgtttctcccaaaggtgacctaagaaattataaatgaggttaatacaggaagcaatttgaatcttttatcaacaaaaaggtcatatggagaagaacatttttttctggaccacttgctgctagagatgacgaatgatgaatgccatttaaaatagatcggttgaaattgtttagattatcagtcttgagtaatttgaatcttgtgctattttatttcttaaacccgtttgcttaataaatgtttgcctaatgcatgcagttgggtaactcagacatcacatttccacaaattggaggaccatatactgcacaggtaacacaaccatgctttatttttgatcacatcttctctgcttttcctttcaaatgacgcagacaaattctcaggaagctcatagttcaaggaatttaatttctttcatctttaccacgaaaaccacccaatttatttctctcttaccagtctttgtctttttatttatttaccaggaaaatgaggaaggaaattacagaaaatctcattcgtttaggagagatgtaagggcagtgagccaatcagcaccactttttcccgagaaccgcacaactcctccttcagaaaagctgttacggatgcgatcaactctgacacggaaattcaacacttatgcattgccaactcctgtggaaacaacgagaagtccctcatctactacaagtccaggtcacaaaaacgtggggtcatctaatcctacaaaggcaattacaaagcagatttggtattcatccccacttgaaactcgcggacctgcaaaggtttcctcaagatcaatggtagccttgaaagaacaagtcctgagagagagtaacaagaatacatctcggttgcctccgcctttagcagatggactcttgttctctcgtctcggtacactcaagagacgatccttctctggtccactgacaagtaaaccgttaccgaacaagcctctctctacaacatctcacttatactctggtccgatcccaaggaatccagtttctaaattgccaaaagtgtcatcatctccaactgcttcccctacatttgtctcaaccccaaaaataagtgagctccatgagcttcctagaccaccaccaagaagctctactaagtcctctagggaattgggatattcagctcccttggtttcgaggagccaattgcttagtaaacctcttattacaaattcagcttctcctcttcctataccacctgcaatcactcgtagcttctctatacctactagcaaccttagagcatcagatttagatatgtctaagacaagtctgggcactaaaaagttaggcactccctcgcctcctttaaccccaatgtcattgatccatccaccgccacaggctcttcccgaacgtgcagaccacctaatgatgtccaaacaagaggtaaaccattaattttacttcttttcactgtctattagttttttgtgtggtttagagtaaaaaagtcatcatgtgtgtcacgtttaagtagatgtgggcaatccgatttttggttcccttcatgtgttccgcaaagttctgcttaagtgtaaaatctagaattgctgatatacgttctaattggtgaatttgcagaggaggatttaagatgtaaggtgtaagacgtttgtagctgcctaaaaactgtaggaggaaggcattccctatagttgcagatatatgtaaatatcctccaatttttagtctcatggatgatcttagttgtatattacatatagtagttgatcccttttgagaatgatgacaaaaatagaggcaaacagagttaataataattgcctgaggaattttggtttttctactatcactcaacgaagcttttttttttttttttgtccagtgatgtgacatgttttacgtccgagatttacgggtttaacttctgtggagtctgtcttcttttgattgggttaagaaactttgcttctagaaggttaaacgtaaaaattacaaaaatctggccacacattatgcagctgaagatcgatcatttacatttacaaggtagttgaaagtagaaaaaacaaaaaaagttcctaacttaggatctcaaatgtaaaacctaacgtggagagacatctaaggatctgtagctttcacaaatctgcccttaacacgcaacctggtctcggctctcgccttcctcgtttcatatcttatggtcttatcatatctgctgaagcaattacaaattagcgatttcgaaagacaatcaacttacaaaagggaaactaaaagaaaaaatggagaacatcattacctccgcgttttcttcttttccttgtaccgctgcatagcattatctctgttctgtgccatctgctctagatcagcattcgttaccgccaccaatcttgtggctctattactagtaatagcaatatgttccgtgcaatgcaagccacaggagtcgttagaacttttatgcgagtgaatggcagcaggaatattgttgctcttagatgtttcctgtcccttggtagaagttgagtggacggaatcctcctgctacattctacttataagtatcacagttcaccgacaaagatataccaaaaatagtagtttgacttatcaattatgatataaatacatcaggtttcattcattccaagatgttctaaccaatagaaataaacccatgagatgtagctactaccagaccagtatatcagtcaccaacttaagctatatatgagggaatattcaaatgtttaaggtatggagtgttttgggattgaatttagggatcgggggagtttattgtctatagaacaaactctaattacgttctgcaatgtgcgttgtgtttgtcaatttgtgagataaataaaatggtttacaattccaaacctaataacaatgtaatacctggtaactctctttgaaagcattcatattggtggttcgggtatcgttcttgagatgagtaacgttgttgaatgtgaaagtagagcctttagtttcgactggactaggttcatcagggttcctcgactgtcccaagttaaaatcccatatctgcaacaacgtatattccactgtgaaccccaggccataaaacagagtcttatctctaattaggacaaccaagaaagaataatcaacgttccgacaggtaacttaacagatttggagacctaaagatccaactgaagttactgtaacatgttctaagcacaaaagcaagaacacatgaccaaacttaaaaccctaaaatcaattgccagagagagatagagaaatggacctgagtgttctggccagtgctatgattagtagcattccattgcataccattaccacaaagactttgagacataagcaaagaagtaaacgacgtcgtcggagatggctgagaaatgcttcctccgccattgattccctccggaaccataatctctccttcgccttcaacgaagcctctcttcagtaactcaagctgttcaaacactacctgcttagacctcccaaagctaaagctttgctttttgcaagacacatcataaggaacaatcagttcttgaacgatgttagatccagaaccccacgaatccaaccccatcccaaaattcttagtcaattcgtcttcgtcatcttctttcttcttaccctttaaatcgattccccacacagcagcaagctccaaaaccgaaggacaacctgaaaacccttccacggcggagcgttcatgcgtcgcggaggaggaacagcttccgtgaacatcccaatcacactcctgacacaatacgagattatctgtgaagcaacgtacggacaccggctctttgctacagttatcacagatctgagaacgaacatgcttcctcgagagaaggttcgccgagtgcacgtgctggtcacaaggcaaacaaagcttcgccgtatcggctctacaaaacagaaccgccgttctctcgccgcaaaattcacacgccaccacactctctgtagtagaagtacccattttgtgtttaagatggtaccttcacaatcccttaaaatctcgctgattttatacagtggagaataagatcaagatgacgaaaggtgatgaagtgatcgatggaagaagaagaagatgacatagacataatctcaaagtctcaagctttcggttttgcagtgaaaggagaagaagaagatgtcattaattgaaaatatctaactgttgtaccggaaataaagttgcatttacataggtaattaattacttgagaaataattggctgcattacagtgtatggatttaggcacattaattggctgcctttctttcagatccacgcacaaggattttagcccatgtttctgctaagcccaattctaagcccattatttggatgggacgttaggatgttaacgacatgatcgataaggagaatatttcacatgtacgaagtttactaactcgtaaatcgttccagatgatcattatttggcaatttagaaaacaaataagtcaatatatatatactaggaacatatcctaaatccagccatgaattcacaccaagtatccaaatatccaaaaatcttgcaagttctgttgtagcacatcttgaaacattgtgcaatgtcattttgaatgtcaataacaacattctatttttgacattggtatcttggtaacgagattgctttcttggtctcttttagaaaggttattatcttttagtcgaatatcaataacatatctctaagaattgtccaaaactcaagatgtttgtccataggtttggaatatagtaaacgttggaaataaattactgatttccacttttcaatcggatgaggatgtgttttttaccttttacatccatctttgattcatctcttaaagccatgttttctctcattgattcatcaagctcagcgaacataattttcctcccacacatgtgtcgctttcacctatgtgacaaatcattattggttgtgtacttgtgttgttatatgaatagaagatgaatggtgttacaatcattgcccattatgtggtgcgagaaacaaaacatccaacctttgctattttcctatgccctaaggttttttcacatgttacttagctattatgtgtttcaaactcacttggaatggatattctatattcttacttttacgaattttgattctttattatgtagaaaacctacagaaaatcacgttgtaaattcggtttcgaaaccataaaggacttcaatattcaactattctttaacaagtgaacttttatcatctatatcacttaaatctttattctctatatcacttgaattcataatagagaaacgaaaatttaactaaacacaacctttaaagaacccttaaaaagtaattaaaaaagaaggaaagtgaattatactaaacaaaagattatgttaaaattcggattcttaaaaatcttctagggaaaaaaaagcaaaatggaatatggattcgataaggaaggaaggagaggagacccacacacaagaacagagtgacagacacaatttggcgtctctttcgatctgaaacatctctgtctctcctcagagattcccttcttaggtcccattgtctctctttctgtatattacaactcttgcaaacctttctaccaccaagataaaattattatttggtaaaaagcaatatctttaattttctaggaaaaaagaaagaaagaacaacactggattgaagtggtcgtcgctttctctttctacacttccaacagattcccttttgcacttctctctttcactcttttcactatttttgttttatcattattttgtttacggaaacgtcattttcctccagacaatacctttattccctatatatataatggtatggtgtaaaaatgttattgccactgtatatattggtctatcacaattccttctctttatcttcctttttgtatttttgcagcaacaacaaaaacgtaatttatagttaggtagttatctttctttgcatgttttgtgtatgtacgtaactaagaatggtaagttttttttgttttccctcgattttaccagttcaataataaacgttatgcaatctgaagttaattatacatacatctacctaatattctattaaaccatactatatagatatagcatgcttcatgttagtacctaatatcttatatagttatatatcacatggtcttcaattgtttgggtgagaaaactatatttattggctttcttttctcatctttttcattcctttgtgtattgttgtttcgtaaactttttaggatgaaagtaggaacatggtgatcatggtcttgacttttgtagtttttatttttgacgtgatgttcttggctttattattcaaaagatgagtgaagtgaggcatcaatatatgatagttttcacaaatttaataattgcagctaaagatcgagagcctttgcccacataaaaaatactttactctaatgtgttaaaacaaatgttgacattttgcatttactttctttataatttggttgactttctctaaaataaaaatctttagttcttcaattattttgctccacccatcatattgcattattaggctttagctattttaaattgtcatctcacggccagattcatttcattttcgaggttagtacttgctgtcgtatagtcattccatcctgaaaatatcatcctgtttgctattgactttcgatgtatgcaccaaacctcaagctagccatcgagttttagatttgaactcacatataacatattcttataaatatttattggattaaggttatagtttgttgtattcactctattcaaatatgaatggattagatgaatatgtaaaaggtgaccgtcttagcaagaagattgatgtgttatgcattagactatgtgaaaaatcgtatattgaatgtaatcgtgactatacgtgcatgagatgaaagtgataatgtgtgatcgatttataaaaatataagtatgaggctatgtgatctggttttgattgagtgatttgtggatctcaattaatgtttgtagacgagaatgatcttctagattgaatgagttgaaagccgtggtaagtcctagttatcattggatgaaggaggagatttatagatttttggatgtttcgagtagatattaaacagtagaacatagttggatttaaattttagtaaaggcttaatggctttaggatattataaagttgatcatgaacaatatttaggttggacggttcaagtttctcatgaatcaaatattcaagtgctaattgccgaaaggaaatactgaaccgaattcgaactgaacaaccacaaaaaacagctaatgtaaatttgtttgagaatatttttgataagaacttgaatccaattcgaaaccgaaattgtaccaaactttttatattttatatcacatcaaagattttactttgaaaaccattattgataacaaaaaatccaaaaactcaaactaaaattcagattaaacaccggtttaccatctagggaatgggattaatataacataaaaaatactaagttgtttcatttaataatcaagtaagattttgcaatgctaaagaaaaacgaaataacagaataaaggaagttccggcattcttttcgatatctacgttgatagtaatatttaatttaacagagtttttccttctttctaaaaacaaaaatctcaggtttaccaactttaacccttcccaagatttttcaacttttattctcctcttattttaaaccggccactaaccgataacaccacgcgcctaaaccctcgcgtgtgaacctaatggtcatacgttttcaagaacacggtaacacggacgtgagacaaaagtgcgagagagcctctgtggtcactttggtctctctgacagctacgggtccactttctcttttacccaaatatccccacgcgcttcttttacttgcgcgtgaactttcaaaaccaaccaatgctaaatttccgaaactacccttcactctgtttttttgttttcttcgttctcttaagattagttttctcatcacaaataataataaactcttttcttttgtttcatctctttcttcttctctgcgtctttgaggcaagaaaaaaagagaagatgaaagcacccaacatggagacgataacggagtctctagagaaatcgatgatgaattgttctctgaatgatcggagaagaagggtcgtcggagatgggtttgggagatcgtcgagcaacgaacacatgactccgatctcagatagaacattggagctcaattctcacttatctcttccttgtcactgggaacagtgtcttgatcttaaggtaaactttaaacaaatgagattcatctttctattttttttcttcttttttttctgctttctaggttaaactaatcactacagaaacttcgaactcgtgtcgttttcgtgttttggattgcattaaatgtacattgggggataaatttttcatgttaatataatgttttttcttgtatctttgtgatgcatttattgcttcagaccgtataaatgtttactcatagggctttttggtttcaggctttgtgtttagggaaagatgtttgccttatatggaaaacttttgcagagattttaaatggctaaaaaaagtttgaaagcttgaccatgaaactaaattctgggatttttgcttttggataaaaacaaaataatttttgtaaagctatttgatgctttttatcagccaatctttcatctcctagatatgattattctcataaggaagtaaaacaaacaaacaaatgtttttgtttttcatgttcaatgatttgtctaaagaaatcaatgccgcactaccacaaaacatacatacaaaaagtacatagtcatttgctcatatatagatctaggaccaaagctttttgtcttaaccaaaatttgggaggtgcattgcaatttgccaagaaagaaaaaagataaaactttatagtaataagagcactttatgattgaattcatgaggtgagctttttgttttgttttagacaggagagatttactacataaactggaaaaacggaatgagagtgaaagaggatccaaggaaagtgatgaatgcagatcctgacagtggagactcatatggaaccgtgtgttcagaagaagatagctcatattacgacagcgaagagtcttcatcagagtcatctccatcatcaagagagaatcataaagaagaagaagaagaagaagaagaggaggaagaagaagaagaagatgtgctagtggttgctggttgcaaagcttgtttcatgtacttcatggttcctaagcttgttgaggactgtcctaaatgtgcagcacagcttcttcactttgatcgacctcattctgcatcttcttgaaacccttgtctttgtttggattttccctttattcagatgagaatttgtttaggtttccactttaatcttatattgttgttataatttagtggtttctcatgtgagtggcattaacacgagtttcaaaggcaatgtatcagacagtaaaatgttaaaatgagtctgaaaatttccgagaatggtatccattaaatgagttgtgtttgctttacaagttgaaaaagaatgtaatgtgaatgggatgtgactatgtgaggaagagttgttgcattaaagttggtcaatgaaatgagccctgaggaatcgcgcgcctcttaaataataaagacgagtactaatcataatgattgctacatgtgactccacatttcatggttttcctttttgttgcatccgaatccttttttaaaaattgtaagtagattttcttggacaccttttttcttttatttttttatctcgggtaaaaaaatggagataaaaatgaaaagagatgatcaaatattccaagcttaataaaggagcagagatgatagttaacttttttttattccaagagatgatcaaatattccaagtggaaaacaacaaatgccttcccatgcgtagccttaatagagaactttatgttgcatacttataaaatgactgttaaggaagtgaactatttacagagattttggtcttccatcactagtatttagtatgggcactaacaatttaatgcgtgtcatgtatgaattgttaacaatataaaaatctataatctaattgtatgaaattactacgtcggccataatactagtttcacaaaaaccaagtacagctcaaactattaaagccaaaatccggatttacttggagtttgattttgattctgtcaattcaagttctagttccatagtaatcttaaaccaaattgaccaatatttaagttagacctatcaaaccaaaacttttagttttgtcgacacaaaagaaaacagagttactacaacaagaaactatgatgggaccaaactactgtaaacggaaagtcggaaacacttacggagtacggttattatttaaaacgaatataaagcaaggggacttggaaattttaaaatcaagcctaaccggaaggtaccggcctaaattggattaaaccggaagaactgccaatttatctcgtcacggtgtttggaagccaacacgtcgacaaaacttattgccaagtgccttcccgtcgataaaactaacctcttcgttgtagaccacaacttcagtttgttttcataaaaataaaacgagagatcatgtcttgtatcttgtgaagtaattctcaaaagatcactttttaaaaatcaaacctctttcaactttccattgccgaaacgaggttgcaaatctaaagattcacaatggcatcttaccatgtttctcatgattcatatcaatcaccaggcaattctcaaaacgtttttataaattacttttcttcttggtaaattttatttctatatatgtaacaaacttgatgaactgaattaatcccatgcatgtgtatatatattttatatgaattttgtaggtccttcaccattgtaccaaccgataatagaggctccaccgccaccgtatccaccaacccgaacgaggtatcaagattactacggtggctacggtcagccgcatccaccacctctacgtccatatagatcagatcatgaatactatggagacggagaatatgttggttgctttccgtttctcagaagctggtaaattccaattgttaatttaagttttatacgttctgaatgtgctaaagaggttttggtttcttaattaaaaaaaaaaaaaaacctatgtataattatgtcacgttaatgtgaaattgtgaatcaagtcaatttgatataacaattaagaatttaaaagtatatttcagcttaaaaacaaatttaatcgcttttacttgtgtttggtaatgatgcagtttgacgacgctatgttgttgctggttcgtggaacagtgctgctttcgaagtcgttattaattctattatgtgatgagaccatttactctcgatgatctacttttgatccgcgtttatgttgtattaggcaaattagaatacttgttttgttcatgaaacaaggacttctaataataaaaacaaacaaaattacgttttgagaaatgtcatgagacggtaaacactagatttttatttttacatccttcttttaaaaatcttgaaaacttaaagaacaatacatattgatatttctacacattctacaaacaatgtttgtagtatttccttttctcgccgtgaatcaaatatagccattttgggacattgttcaccaatgtttacttacaagctcagaaaatggtaaacgcattagaattcttcagggagaggacgaccacccaagaatgctttaaacaacacaagcgctctcgcgggctgcgagaatggtacctcgtgggctgctcctctcacagtggcaaacgccaatgtgttcccataaacttgagtccacccaccaacctgtaacaccaaacctttattaccacgtctcttaaatattcaaaaatctgtatccgaaccgaaacatatcaacagtagattcgaaaaacatcaatcaccaagaattgagcacccttaaattttagagtcatgatgctcacctgttgtcctgcgaaccaaactcgataaggcacggttgttcttagtcccaactcttcagccagtcgcttcactaatgttctacttccggttaacggaatcacagagtcttgatctccactgttatgttttaaacagacacgtcaagcctagtttaacagaagttcacaactctgttatgaacattgctttacctgtacacaaaaactggaacaccagctttaacaagacttcctacgatatttatcgttggtacttccacatcaagtacttcgtaatccagcacactgtcatcacaataaaacgaaacaaatttagtaactagacccaaataggcaatttcggttaaatgtttacgaaagaaaatgatattactcgctgcaaacagtccatttgcgagttccgacaagccgagcgtggagagctttttgcacatctctccggttaagatagttcaccgtctcatcttctagacacacatccaccgtctctcccacttgctacatcattccaagaaatcagcagaagaaaattaaaaaaaacaaaaacaaaagtgtttaacacttttattggtttctgaacttacttgaggttgagggctaactactttggattgagatagcacagagggaatgcagacgtcaagagtaacgtcatatttgtctatgaatctacttgtttcgatgccaacttgacttagcactttagtgcacatactcgacactgatcctctatggtactcactcaaaaatctcgagtaattacaagaagatgtgaacaatttgtaagttggatccgatatcaacccgtgagaccagaaatactctgctcgtgaattgaaatccgttgcaaactccataaccggattgccaatctacaaaaccaagtgttatgaagacagaaacataaccggattatatgaaaatgttgaggagaatatgaaaatactcacagcaatgcctttgagattaaacaaattgtgcttcttgttgtactgaatcataagctgagccaactgaggaacataatggcctaaaaatttgcaatttagttaatacattttagcgacgaaaactactgtttttcaaagagaaacagagcaatatttacgtaccagcatagctttcaccagtgatgaagagacttctgttgagatattgagggaatttgaggaaccatttttgcaagaacacaagattgtcttttgctgcaaatttttattcgaaaatggacaaaaaagacaaatattagaatgtttgatatgtgaagacaaacaaaaagaaacaaagatgaagagaataatcctcagatgtgatctgaattctgcaaaaaaggtcgattatttttctctttttgtcagactgagaaagaacaacaaataaaagctgaaatgttttcagggaaacattaatatatatatatatttttttaaaagcgatcaaacaagattcatatcgcatgcaccccagtatcatcatcacaaaattaaaccatttactactcgaccaaaaaaaatgaaaaaaatactcaaattcaaaacatacacaaagaaaaatacttgaactatagaaacataacaattatctagagcagtttatgtctgaaaacataacaagtaatgttggtatcaatttgggtttcttttacaaagcctaaatcactacactatttatgaaaagagtgaagatttgagttctagggtttgagttataactgggaatgaaatggagataattcggtttaataaattaccagtgatcttatcattcacaccctcataagaggagctctcatttgcataagaaaatccaactccaacaggtgtctccagatacaacatattagcctctgcacaattttgaataaaaaaaactcgaaatcaattctttcttataaaaagtgtaaaattcgaatgttccaaggactaaccttgattccagctgtgttgatttctcaccaagattgatccctttggtctaaaaggtccattctcagagaatgcaccaacacctaatgatgaacatccaggtcctgcgttttactcaaaaaaagattaaaacgttttgttttctttgtaatctttagggtatcaatctgtaatcaagaagatgaaagattttagtatttaacctccattgagccagagaacgagaggtttagagatgggtttggtttctgcttcagccaagtagtaaaacagagctctctgtttcttctcgtcaatagtgacataacctgagtactgctgaaacccgactcggggttgaccgggtaaacgggtgatccgatcggcccgggacagaatagttgagctcactaaactcagagcttgaagcagcagaattagtgaagtcgccattgttaggcattgtaggcgaggcattgttgtggttcttctcaagtcaatagagaagaaagatgacttttgggttttatatcaagaaatcaccttttgtattttatttttgtgaaaatcgagtatttgtaaatatctttcttctctgcaaaagccgtaagccgcgtgattcacaggtaaaagtttcttaaaacatttcttattttattgttattatgatggcattccaacaagtaaacatattgaaatggttttactaccactactcatagttttaggtttggttttcttcttatatgtactaaaactttcgttttgaatcattgactaatttgggtgatgctagcttcttcttcttttttggtcaagagatgatgctagctattcaagttattatgtcatagaaattttataatgaaccattcacaataaacatgagtaaacaatgaaggtaattaagaaacggttggtgatgtttttaagcagtaatcagcaaatggagcttggcgtggctggactttcactcaaacccccaaaagactcactcatatttaccatttctaaataataataaaaagttggaaagggacttgaatgtggtcctctttctataaaattttaggcgtggaagagaaaaaaaacgctcaagaaatttgaggacaaataatagagaaaatatgtgggtgttataagagcacgtagcttctcccaattgcatatgcaagaccaatgcacacaatttgtgtgacacaagtatgtctccgaaggctgaatagtgtgtacattagttcaattacctataagagtttctttgaatttcagataaatacattttgaaacttatgcttagtatctcaaataaagctaaggtccttctaatactagaagttaagcttcaaagaaatactacaccaaattttgaaagttacaccgtacaaaatagagttaacgtaagattttgcgttttattctctgctaacttgatccaatactatttggatcatttattgatggaccgcggatgcgaacaaggtttaagaaagaatgacatgtttgacaagtcagtttattttcctaaacacactctagagaacataacttatgtaaatggcaacaaataatcaataatccaccccatcttgcaactggatcctcctgctccgcatgctccattcacagcctaaatgcattatctttcttgaccatagaaaaatgaattataacaatttaagttgttagggaaatgaaatagagaggtagaaatgggtaaaagacaaattcaatttggtctgaaactgaaaacaacttttgcctttatagccataggttggctaaaagagtgttactggcccatccccaccttctcacctctcgtctctgatcttccattttccatactcaattcccttttaccttaactaacttttttttttttggcaaacacctttactaactaagttttaagtactatcactttttttagcaacaaaataattattacattgtgttctttaatacacgaattacaaggagaaatgcgcacacacattcacactttcggttcttatgtgttaaaaatatattcggttcaaatggtaaccgaaaaacgaaaaagaacaatccaatgtaaaccaaactatttccataaaatctatttgttacaatttttttatatttattttgtctatctgaatcactacagtttaaaaccattgagtgataaataaagattaatcttctctgtaaaacagactaactcatctcgacagatctctctgttgctttatctgccttgaggttttaaggtctcttggctttgcatttgtttaattacttaagccaagtggtgcttttcaatatcttaactttattggattcaaatttgagttatcatggacctgctctttgttttaagaatgatgtacatagtattattgaataatgtacattttgaaacagctaaatctgtaaactttagacaggggaaaagaattatagttttctatgaacatgtgattaatattgagttatttgtacttaattggatatccctgctaaacagtaagatccacacacacacaaaacaaaaaaacaatcccaagaccaaaaagttgtgtctttcaatcctacgacacttttgtgttactaccatcttgatgtgcgtttgtatataatataccatgctaatttggtttggaagttacacaaaaagacttaggtcagattgaaaagggtctaaactttggaagaaaagttcattaacataattagaaatcaatatgtgatatgattcacaagaccaccttctcccatagttagcaaaagctagcttgtttgattaagattcgagaaatggggcaaaagtgtatgatgtggtggggactattaaattaaagagccgcatgcctataacacaaccacttcttatgtggtatcaccaatttcataccttttgtctctcccttttctctttatctttagtgtatcaaatatatgctaacaataggataatactatgatatatttgatattcatgataaatttagcaaagatactctcggaaggattcacccttaatagaatatatactatatatattgaatttgttaaaccaaggtattacattaatttcaaactccaaatcatcaactcggtagaggctgcgtgcaagattttgttatatggaagatttgactttcactagaaatacaatcattttggtcttttaaaattagcatttttggttattatagtcttcacataatcgaatcgattacccaaatggtgcaaaagcatagagagatcctgaggattaatttctgagttcttaaaagttttttttttgtgtgttctaaatattcatcaaaagcatcagtacctgcagaatgaaatgacgtgccaaattccattcagtcatttaccaattgatggtacccttaatagtatatagtccattgtggttttacggttaataatgatccattaccaataacttagacgtcaagtaactgtttaatgtggtctctgtttgtcatacttaatgaatttggtttctccaccacatttaattctggggattagtaaggcatatgaacatttcaattaaagctttcttctcttctctgttgccttggtaccccatcagaattgcttccgacaagagacataaataccacaacaaacatttatctgaccgatcatgaatcaacagatgagaaccaaaattgaacatgatcctctcctttgacacgtgaccttggcacatcatactttctaatgctgggtctctctggtgttatttttttagattcagagacagactagtttccttcaccatcccaaagtaagtagatctactctagaccattgatacaatgtggagttcgttttgttaaaagcccccaatacctttggcattttaatgaattcgcttcttttggggcaaaagaatgtgtatgtaccccggggcctagcctaatcaacccaatatgacttattgggttttcaggccttcttaagtctcaattccaccaaatggtggggatttaagagggcggatcatggatttggtttacgggttgatggcatataagttctcatttgctctctggtacagaaaagctgatgcttccaccctacactcagacgatgaaaactattacaatcaggaatagaccagtttttttttctatctttaagaggagaccaagagggccttaccagccaggatgaacaacaaatctacctctggttagtgcccaatttacctgctcaaacagacacattcagaatctccccaatgatatttcttctgtggcccaacagttaaaatttgcagacttccttaccttgtcggttccaagagaatttgtgacaacatgagtgacatgttcatccacctgggttgtgcagacagcaccaaactgctcagcagtttgccacaggggatgcaagtgcggtttggcttcacccactgggattatccgactaaatacaatcctacaaccagccaatatctttcgttgctcagaagctaaaatatttctcacatcaacttcatctaatgaagtgtgcgagaagaaattttgatgtattttctcaataacctgcacagtgaaaccatgtgatgatgctgagatccaaaacgaagagtagaaaataacataacaaggtgcatagacaaagtgcagaccgctaatgaagatgccaatgtgccctcctcaggtacctcatcacgatctaactcaagaagagaaggaccaagaagcccaaattgccgtctactacaagggaaataaagatatctgcaaaacaagataattaacatcagcaggaaaatattatacagtaagtactacggtctcatgttagccatagtgtgaaagatgatacctttcaacagctattaaattcattttgtgttgaggccacactcggacagagtcatctatgatcaccacagacgattccatacccataactccttctaaatctttgctcttaggtactcgttcgtctccatcaagaggatctccatcatctcctttcgatatgacccgtccattaaatagaacccctttgggatcaagcagcttggccatctctgtagcatacaatttgtttcccatagtgtaaagatgtaactcgtacagcttgctagcctgaaattcacaggaatatttacattttaagtcttccacacgtagttgaacagtagtaagataatattattaactaagtcaccttctccaaaaaattccaaatccctggtcttagtttagtccacattcccatgtgcaggaaacgaaagagatgtctatatggtttctcacgatcttgttcttccttctttcttaatatctcctcgtggcgggattcaacctcattaaactgaaaacgatagaaacaaaaactttagaaaaaatataagaaaagtaatcaaaccagaaggaagataaactaaccttagctgaattgagaagggtgtggtctatatccaagacaagagagagcttttgagatgcaaacattttattctgttcctctaacctacgaactctctctctttgaatagctactctctgaatgtcatcatatccttcaaataggtgttccacatctccccaactgttcatggaacgagtgggaccagctgcagccgttactgatgctgctgaaactgacacatcctcatcctgggcattgggatttgaaggattatgtttaacatctctctccgtcttaagctgtaccgaatgcatacttgctgggggattgccaagttgttgtgatacgacaaccatatcagcaatacttttcaggtttttggtgaattgtgttgaaaagtctggtgtcttcccactgagaagttcacccgaaattttcattttgctggtaccattctggctaatattttgccgtggatcaagctggggaggtgtttccaaatcttctgccttacccttcatagtcaaggttcctagagtggaaggatcattcactttggtctgcttttccattgaagagtccgttctttgaagagtacttccatgcaggattcggcgaggatcacgaggtttcatgcgaatgcttccagattcggcctgaaagtaccaaaaaatagttggagaaaaaattgaaagaaaaggttctagaatccctatatataaaggatactcactgcaggggcgttttgggaagaatcctgaagtactcctgagtttaaagaattagcagctaaagcatttgatgcaggtatactaagcggtgttgatacccctggttgtacggaagagccagggagttgtgctgctcttcttggatccatgggtttctgaatagctttttcaggtaccttttgtctttctcccattttcaggagattcagtagcattgtaggatttactgcaatatccttcaaaagggattgcaatgatgcagtatcagttgaagctgtccgtactttttggctcacagaaacagcactcgtgggcataacacttgatgtcatagatgttacaccgttctcaattagcctgggcttggattccagttttagaagtcccgatgattctgtatcctctagccagccaccagttccagctgcttttggtgcatccgtatcactcttttgtcttttccatgcaggcccatcaattaaaaattcatcagcggctttttgttttcttgggttcaccaagtctgcagaaagctctacttttgaaagatttctagcgtcgccagacgagtacgaataaatggttacattggcagcatcaggtttcgcaagccttagtcttggatctcgactctttgcagaaggtttcactgtctgatcagaggcagttggtgcagaaatagcatgaattgacagatgatgtggtggaacagtgctagaaacagaatttgcaacaggcatgcttctagaattaaaattggagggcagaggaacgtcttgcccataaattaggtgactccccgggttcgagctcttaacaacagaactggaaacctctccaccaacgtctccattgccatcattaggttctcctgatggggttgggcttggaaggtcatctgtcttaaacactgaattaagaccaaatttttgctggtaggtagaaactgctttacgggcatcactctcatatgaatagactttggcaccctcagtcgtttggctctctctaccaacgggaaaacctggtctaaccattgtatggcgaccatttacaggtaaacttggtgttgtttcccttgtgggcgacggaaggctgtctgcatcatgatccttatgaaggtctagaagaggcagcataggcaacctactccttaagtaggcggctcctcgatgtgtactttctgaagtcagctttttggcaagaaaagaatcaccattactcggctgagtcatttgattaacattctcttcactgctggttccagcaaaaactgcaatagcagaacggcttaaatcctgattcatggtctctatctgcaaaaccaagacatgtacttatgtaagacgagaaggcactcatcccaatgtttggaacagtggaaaagattttgacttgtgctacttcaacaggtaaaccaaaggaaacgcacctcatttttctggttgaatgagagaaattgggaaaaatggtcatttacaagagtcagcaatctgcacaagaaaaaccaaaaataatgtgagcaatcaaaggactccaagaagcatctttaatcaaaggctggcacagtaaaaacacagattcacaacaaccttgacatagtctccttattacgctccttggaaatattgttcatcgagcaaaacacctgaaagataatagattagttacataaaaccgtaaacgtaacagaagattgagggaagggatcttgagtggcacatacatagttaatggtttgaagagaagcaaatgacaattgaactaaagtatccctcttcggaaaatcatcattatctgaaaccagctctcgcaaagactctaacgcccccaatattctggaacaaactccttcaaatccgctgaaacgaaacagaacaaaacatgaaaagaaaaaaaaatcaaacttcactcatcaaactctgacagatgttttaatttttttcatcatcatcatctgatctctccattctcaggatagtcttacgtctgtgcttctaccaacgaagtactctccaaaacaccacgaattagtttcactttcttctccaaatctctctcctttagaattcgatcatcttcaactttatcagcacttatcaacacaacagattcagtatccttctcaaccaaattgtcatcagaagcattgtcgaccaaatcaatttcaccttcctccaactcaccttcttctttctcatcatcactatcttcaatcacaatcttatcactctctcttggttcataatccattaccaaaccttcattaaaaggtttgttctgcacagctcgagcccaagctaaattagataaacccgaattcgcatatggacggtaagcaggatactgagaaatcaactcctccattgtccaaaccctagagttgccattagaaccaccaccacctcctcctcttcctccagccacaaccccaacatcgacgtctccgccaacatcggccgtagtagtagtactcttgtgcttaacttcaatctcagtgttgacagaatcaggaatctcaccttcctcaacatccaccattaccatcaagttttcatcgttgcccattcgaattagggttctagaacaaccagatcgagctacaagcatgtaaaaatctcaaaactttgctcaaaaacgaatccaaacccgattcagaaacaaaaaccttgaattcgaaaatcgcccactttagtccccggtccagagaagagatctccaaaacagaaaaaattagggttcttctctaatttaaacgattcaaaaaacagagattcaagttaaggaaatgttttgtcaatttaactctttttttttcaaagattcacaatttcgaaaattcccaattcgagatctaccaccacctttgagagaacaagagagttttcaaattttcttctccagatccaaattttgagatgcttattattttctccgaaggccgaaacttgaagagaatgtgaaatatagacgaagggagagagagagaagaagaaggagaatctagttgagagaaggagtttaatctagaccgtacacgtcagcgatccgaacgaggtaaattatgtcagcgcgacgtgtgattggcgccagatgaggggtattttaaatgacgaaagtagacatctctgtgaattttctttactagttttgtgtctgatgatccaaagtttttgactcgaaaagtttgtcagttaacttacctctatggaagtcgaagttcgtacataaatttcagtggtcaaatatgtcgtgcggcttttatgaaactgttgcttgtctttttattataactgacgaaaaaaacaaatttggactggaattatgtgcataacaactattttgtgaaagataatccaaagtaatatgggaacttatttgatattttgcatcactgagttttggtattagtacaacttttggtttcaaattcaagctcacgataatatgttaaatatagttcatgttgcactacaatccagacaaaaaaattggttcgagttagatacggtttcaatttaatttctatagattataaaagaagaagttaaaatacagaaattgttttcaaagtagctatcagattaccaaacaacataaagtggcagatcttcaatctgcatataccaaagtcattttctaaccaattgagtaactatttgtatatgttcaagggtcatatgactacgtataccatttaatattatgttattaatcctgttgttaggggaagcaagaaagatgaaaactcaatttcatgctatgcaacaaatcatcaacacatcaagatgttcaaatcagtcaaaaggtaacactaaggcaaatgatatcctaaacccgtataaatctcaatgtttatataagatgtgtataataacctcttgtggtggcatcaatattcaatcaacaatggtgataaatgattgaaaaaaaaggaagaagaagaatgagaagtaatggccaaagtgatatacaactaacttttactaaatctacatcttatccgcgatttttgccacagcatcagcgagcttattgagaacagcgactaagctatcaccgtgatcttttctttgctctctgtctagttttaagtttaaattctgaacctcaagctgtgccgccaacaactgcccgtttctttctagtatctctatcaactgattctgcatcttctttgtttctccttcttcttcttcctcttccttttcaccaaaagatgtccgtttacgcttcctctcttcttgtgatgtcgatccaccttccacgtttgctgcttctggctgtttctctttcactctaccttcaagttcaaactcaacattttagtataaaaacaagaacatagagacccttcaacataaacgaaaagatcacacaccatagggaagattgttaaactacttttataacacaatttgagatgcattttagaatacgaaaacatcatttatctacatgacaacataactacatagtcaagactcaagagaaacacactctagagctctaaaactagtttgagattagcatatagagcaatagatcaagcaaatacacacagagagataaacaaaccttgatctgctacacaagcttcttgcttctctttgtctataacatcttcatcaaaaaaattgaacttcataagaaatggaatcattctgatgaacatacaaaataaaaacttaaactttgatctgaattttaccagtaactgatttagccaccggagtagaattcaacttctcaggactttctctccgatctaaatcagacaacaatccctcgtctgacgccggagccaatccaagcgaaagaaccggaaccgccggaggaatcacaccaccgtcaacaatatcataaacctccttatcgaaaaaaccaggaagcttcttctctctacgaacatcattcctcataacccaataggactcagtctcttccttaatctgagactcccattctttaatcttcttataatctccggcgagattgctccatcttttccggcactgaaccggcccacgatttacaccgtgacgtttacagtaagacgaaacagaagcccatttaggctccatttgacccgacccgagagccatacccgccgctctccctcgccggactctgttctccgccactctcttcccttgaatcagaaccagaatctcttgtctcgtccaacgaggaagtctcgccgtcttaacgccgtcatctccaccgtcatttgacggcgcgctactgttctctccaccgtcaacggcgctcactcctaatcctaactgttccagagccattcaaacggaatattccttcccgttttgataattccgttcaaacgggttccagacttaacggcgttatggtgaggacatcccgttagcgccggagagagagaggagctacaaatgaaagagcaaagaaaagatttattttgtgagataatgactttttaatgtatcttaatctgatttttaatttggtgactgtagataaaattgacccttgtgttatcattttattttaatttcgtcccttaagcctttcataaggttcatgtagatatgttgaatttaagtagaccgtaatctttaattcctttagaccgtaattagggattacatgcttgatatggctatttcctgatttttttgacacatcactttcatcacctcattttctacggccaagatcactctaaaaataaaatcaaaaattatctttttcttatattaataataaactgtatttattgtttatgtaataaagataatgcacatataattttcatatttggtaatattatgatatggttgtgtgtaaatatggagggggcgtagattatggcaataaacgcgccctttgagtatttctattggttaatttctctccaactaccataagttgcttttactccataatccttatatatgcgttttggtcaatttcctccgccatttatttttttggatttttctacgtttttgtcagcttaagataatgacaatattagtgagtctctgctttaataacctagtgatctttaagagccctcagggtttttgggagttccattacaaaaaatgctataaacattgtagaagttttcaacagtcacatatcataattagtaacagtaccctaaatcatttaaatgattaaatgggttttgggaccctttttgtaaactattttttgttgcaataaactctgaaactatcttttgttggcataattctgagcctacttaaatgtataaacaaatcgtagctaaccgttccttaaaacaatgtagacaataagacaacatcattatgaaaaagcaaatgaatgacgagagaagcatgaggaaagcttgctgacgagtagagatagatatatcaatatattcacttttgagggtttaaaaataagaaaaaaaatcatgataaaaaaaagtttgttgtttaaggtttgtaagaagaaaagaaaaacagagatatcactactacatgttaaggtttatgatttttgacaagtagaaagagaaactctagagctctagaactatagagcaaagttttctatgaaatagatcaaatccaaaatggagatatgatttatgaaacacacatgactaagggtaaacatgtataaatcaaatcaagattaaaccataatgttctttgagatggagaaagagaaccaatgccaatgttttgttcaagcttgctagtaagaggacatgaaactaaagccaataaaataaaaaccaagagacatcgataccgtaaataccatttctgtttgaatatagaatttcatcttacgcatagaatttgttttttgttttattagaaatcttgactcagtcgtataaatgtttagctacgtacttaatgcaatactttgcattaaagggaacccttaaaacccctaaagggtagattgtgaaatgaaatgatgcccctaccactaacaccaaataaaattcccaagttttttttttcatttgcccttgtttaccactcaaagtctatctccaaaatcgcatcattcgtttttaatcattaatttaaatggctattaatgcttgattatgttttatgccccctcccatccgtttaaagccactttattttctatggaagaaatgcccaatggattgattatcttttctagtttgtacccatccatacgtatccattgatttacaatgaaactctagaatttttctaaaacaaaggtacgctagttgcctagacgactagaccaaaaaattattgggatcacaaagtcacttgccatataaaccaatgacttggccacatttagggcattattaaaatgattccttaagtttaatcataagtggtaatctaggttaattagtggaaattgatataaagtttttttttgtagaatgattactttaggagaaacaaatcatataaggattgaaacaagacaagtcacattaatttcaaaacatgaaaggcacatcatggtacatagtaggatagtatatcccagtacatcacaaaaacaaatccaaataggcaaaaacacacaaggagctttatagacaaaagctcaaatctcaaaccataagatcgtgtagagaagaaagtccaatatcatcatcgtaggaagctgttgggtgggaaatgtcttaaagggttctgtcgtagcagctctgtttctctgcatttttttaagtaaccattgttagatctctaccaagtcatgatataatatttgtttggtgaatgaatctttaggggaatttttttgcttacttttttatctcacggccgccattaaggggcagaacgtttgatgatgatgagatagtttcatcattcttcttcttttcttcttcctctctgcatttcagaatcatgttaatggtggaaacatgttttgttcagaaaacttctgaaaaattagtcaaacttactctgtacattcttcttcatcgacaaaaacctcaaaggtggaagcagatgctgctgcaacagttctcacaatgggtttctgaggaacctgtgacaataaatataaatgcagttagtgatcaatttatagagatagtatgagccaagtgagatagttttgtttaggagggtagagggaaaaccttgaatgatgcccattttctaggtaaagaattgttttctttgttcctctctgctctgcctccaagcatgagccaactaccaaactctggtcttgacttgtctgactctggttgattccctgatgtggtgtctgaaactgcatctgcgtagatagcaaaaggtgtcttggatgatctgcaaaagacaaagttgcttaccatagtgagttgcagaataatttaaaggtatgagttgatagaaaatgcagataatgaaaacaacgagaaatatagaaccaatcaaactacttactgatttggctttagctttttggcttgtgggttagaacttcctaacgcctgccttcttgcatctacagaaaacattttcatgtaagatagcttaccaaaacatttcagtggtttccaagttaagttaatgtgactcactattatctcccctggacaataaagtgccaaagcttcttgacggtaagtcattattctcctttggttcctgctggtaggtagaacattaattatgattaggaaaaaccttagtccataatgaatagatataaagtgttacaaagagacaaaactttttacttcatcagctgtgttggaccttctcatcgttctcaccataaacttcttgtacgcgtcattcaacttttccactggctttgcatccctgcacaagttcccactttcaaatcagaccaataacttggagccgaaacatgaaagtaagattacatatctgttcatttacctagagattccaagattgaagatctcattagcagttttgaccttattcttaaactcaatgtgcaaagcataagctatatagtagacagcatgtgtctttccaatctcattgacctccaaaaacttgtaaatcacttccgcatcagcgcaatgctccgccttcaaaacacacacaaaaactatgagtactctctccataacaaagaaagaatcatctagagggtttaattaaagatagaatcattacatattccaaccagactttaagataacgaagatcatccttgtaacgttcagagtgccaaaatttacgaacacattgctcatatatcactaacagtcctgaacattctcctcctggtggaaaagcctcttgtacccattttatacaccttccaaagaaaccaattaagaagctcagtttacaaattggtcacagcataaagattggttcaagaaaaatttcaatttttcaacaacccaatcaagaatgataaaaggaactcactctatccatggagataaagggtcatctccttcatactcatcaatggcttcaatcaaattcctaattcacaaaaacaacacaaaattagacaagaatcgagcgattagactaaaacccaagagcaaagatgtgagattgaaatcagtacctgcgtttctcgatgagattctttctcaattggtggtcagagtgagatttgagagcgtggttgagaataccaacattgcgacctctcttcaatggccggacgttctccttgaaaagctcccactcgtatccagtctcctgcttcgaattaagaaactctgcctctggatctgaaacctgaaccttcgtttcggctgccatcgtcgtttcttcgagcaaattttgaatatcagagagaatatagccgttagtttactcaatgagagagcttcgcaactttttgctttgatgtacgcatactcggagcgtatagacgcttttgatgggcctaacttagatgggccatgatttgatttcttaaacccattaagtggccatctaaaccgaattgtgtatactcctactacaaataatcgataagagaagaaaaatgacaatgagcgaaagtaaaatagtaaaagaaatgacagaatacacttcattaattcaattggctgaacaaaataacacaataatccagagaaaattatttttactgttttgttttcttctaaattagatggttttggtcttttggagaataacaatcaaagcaaaagataaaagagaagatgtactctttttttaccttctttaaataaattacgagcataattcactttttgacttggaagctaaaaaaaagttcatccacaaccacaagatgctctctgtctgtcggttcaacaagggatgatcacatacattgcgttacacgctaaacctagtgtgctcaattatgaattcctaaacaaaacgtactcaagattagaagttgtatacaaagtctgtttttccattgtaacaacttccaccgacaataaaacagtaacagtttattgaagaaaatgaaatgaagaaaacataataaaagaattgatatttatggtatccttcagtttgggaatgtgacacacatgatctcctttattgacgtttaagtttggaaaaaaaaacaagtctttaaatgcatgcaatcgtattcgcaatcaatatacattttgcttgttattactaaagtctaaaactaaaagccttttgccgtacgtttaagaattccataactggaagaacaaatcatgtttttaattcaaatgtttaaaacaaagtctacattcaaaggaatttagaacacactttttttttttactttttgctgggaattcacaaactctttaacgagtctattcacatttcacctttccgtgcccaaactcattcgatttctctaaccgaaactaaatcatcaccaaagaaggtacaccgttacgccaacttgcccaaaggaccatgtgtccccaccatgctgccaattgggagccagcaatacataaaacagacttgatccaactttttacaagttagatgcagtgtctttttcgtaaatcataatagatccaagcccattctcgtataacctccaccacatcactcctcatatcatatgtgagacagccacgagtcttctaatttctacacgccgtgtcggcaaagcctctcgtcacttctctctgacgcttgtcgtcacttttgaatttttttaatttttaaataattgataaccgaaacggtgcgttttactcaccgtcgtcgggaaaaaaaacatgaggaaggaagttttgccgccggtgttatcaaccaccacagtatgtttcgagaagaaaccaataattgctacattactagctctctctctcgtcatgattgtctggaaccttcctccttactaccacaacctcatctccaccgctcgtccctgctccgccgtcaccaccaccaccaccaccaccttactctcctcatcgaacttcacttcggcggagaatttcaccacctctctctcaacgacaactgcagcagcttctcagaagtacgattcaactccctcagatccgaacaaacgcgttttccaaccgttcggaaacgcggcggcgttattcgtactaatgggagcttaccgcggcggtccaacgacgttttccgttatcggactcgcgtcgaaaccgatccacgtttacggaaaaccatggtacaagtgtgagtggatatctaacaatggaacttcgattcgagctaaagcacagaagattctaccagattggggatacggacgagtctacaccgtcgtcgtcgtcaattgcactttcaattcaaaccctaactccgataacaccggaggtaaactcattctcaacgcttactacaacgaatctcccaaactctttgaacgattcactacgttagaagaatcagctggaatctacgacgaatcgaaatactcgccgccgtatcagtacgattacctctattgtggctcgtcactgtacggtaacgtgagcgcgtcgcgtatgagagagtggatggcttaccacgcttggttctttggtgacaaatcgcattttgttttccacgatgctggtggtgtgtcgccggaagttaggaaggttcttgagccgtggattcgagctgggagggtcacggttcagaatattcgggatcagtcgcagtatgatggttactactataatcagtttcttattgttaatgattgcttgcatcggtatcgatacgctgcgaattggaccttcttcttcgatgtcgatgagtatatctatttgccgcatggtaatacactcgaatccgtgctcgatgagttctcggttaacacgcagtttacgattgagcagaatccaatgtctagtgttctttgcataaacgactcttctcaagattatccaaggtactaaacttcaacctctaaaacacttataatgcaattcagaatcgaaaagtttggtcataggactttggaataatgttggatggcttatgagcattgttctgtatttagcttagatgatactattaggatcgaatctagaaattagcttccattttgattcaattcttgtttttgtttgggatatttcaggcaatggggatttgagaaattgttatttaaggattcaaggacgaagatacgacgtgatagaaaatatgcaatccaagcgaagaacgcatttgctacaggagttcatatgtctgaaaacattgtaggcaaaacactacacaagacagagacaaagattcgttattaccattaccacaacaccataactgtgcatgaggagctttgtagagagatgttaccaaattcagccaagaagaaggtgacattgtacaataagcttccgtatgtgtatgatgacaacatgaagaagctagtgaagacgattaaagagtttgagcagaaaaaacttgggacggatgtgaagaatttctcatgaccataatatagctgtaatctctctgataagcattttgtctataaaggtatagttgtttctacattacatgtatcatttttcattctgttttgtcctcttttactatttcattaatgactttgatcaatatttttgaaaattacttgtgttttcttttgttatgtattgaacttaatagaaattagagttactcaagaccttggacatacaaaacatcgttggtttttattattttgtcgtaagacaataattgatttagctaaagattcttaaaatcattgactcaatgattcattcgataatagcaaataattcaaagctaattagttcttagtcattgtgattcagttcttaggcaagacataggtagcttctgatgtttctaactataaataaggtcatgaaaaggaacaaagtagattctttgtcccttctggtgtgactatgattatacacaaagaatttcttgttttgatttagatgaaattatccaatcttagataggattctctctgataagcattttatgtgtagtggtattgttatgtttgtttacttgtatcattttggatctgtttctcctcaagattctacttctcattggaagaaaatgattatttttttctgaaatacaaaagactactgaagcaacatgtcaaaatctaaataaagtttctctatgatatgttcttattactatgtttcacagtggggtacttattagatctcaactttttagccgtatggtccttatctaaagtctaaatacttgttattgactaccaatagaaaaaaaaaactgaactagttgccaagagagccggaacgaagaaggtcatcagaaggctcccaatcgatggaggaggagacgatcattgagagcgtggttagaacctgagtgacagatggacgcgagttaagatcagttgcgacacagctcttagcaagctgagccatggtgtaagccagctccaacggatactcattccctagagatggatccataaactcttttaacttctctctcacattctctcctccaagcacactgtttatcactttacacaacatctccacttcttcttctccttccttcttcttatgtatcgttactgcttctctccccgaaagaagctcaagaaccgcaactccaaaagcaaacacgtctagtttcgaagtaatgactccattctccacatactctggagctaagtagccttgtgttccttcaacatgtcttgttaactgaagatcaagatcaccttcatcaagaatcctcgcaacaccgaaattcgcaatcttggctctgaaattagaatccagaagtatgtttgttgattccaagttcttatgaatatgaggtggagttatatagttatggagataatctaacgcctctgccacatcccttgctatttcaactctctgtttccatgtcaaactcttcttgcccgacgagtgaagccaatcactgatcgatccattctctgaatactcgaagacgaggtacgatgttccttcacggatacagaaacctgagagacggatgatattagaatgatttagcttcttcaaaagattgatctcagaggaagaaacatctcctttgatcactttcacagcggcatcgtcgccgttgattgtcgcgcgataaacagagcctttgattctgttttcgtcgctgaaattcgaagtagctgattgaagatcgttgaatctgtatagtgttagagattctatggcggattttaaaccgaaagcttctgatgaattggataaatctattgaccattgagtcgttgttgttgtgggaatagattgtttggttgatgaatcaaagagcttgttctcctccggcaacgacgacggtaatgacttcttcttagaccttcgtttgtagaagcagagagctaagattgagagtaagagaagcaaaccagctccgattccaattccgatgtagatccatttgtgagaagaagaagatcccggaggatcaactggcgtttgaggcggcgtagcaacaacgggtggaggaggaggcgacggagatataacgattttggtaggttcagttgtgagaggaactagaaccggtgtgaagaagaagatattgtctgatgtaagctcgttaccttcggttatggcggcggatgtgctgttgaacatctcggcgatgccggagatactatctcccatggcgactaagtaagtcaggagatatttaaatccggcggtggtttgtttggcggtgggacaagcacatcggagaggaacaaggaggtttaagccgggggttagttgtctctcgccgtaacggttttgtgacatcatggcttgacacgtggataaagcttggtaagtatcgttagccactgagaaataggtttcatctcctctgttaccggagagattgtaagtggcgttgtgttggtaaaatcctccgctggaggaggagcaggagcagttagctgggatcacgactaattcacgggttgggattctggtggtggctgtggggaggttgttgattgattggatctctgcggcggagacgttgaggagtttggcgattgagtccgccgtgttgtacggtggttgagaccagaaagtgaggtatgagcggcaagaaggtgggccgttacatgtgaatccgttggttatgttgtcgtagacacggacctcgcaggcgagctggtggttgttgacgtacggttgctgagctttcgccggtgacacggcaaagaagagaaggaggaataaggtgactgagagcgcgtggagtgtacacgcagccatgttttgtggtgttctgatctgaagagggattctcgtgagctttctcctgatttaaacagagaggacgatgatgaaccaaaggagacggcgaagacttatttagtcaatggaaacgcgtcgtatgtgttgactttttgtgacgtttctcattggtcctaccgtcaaaatgataatatgtgggattagaggagattttggtacgtcttctagaaagttgaccaggtcagtaaatttgttcagtaatagtcttaagctgaatacaaaagtgaactaagtaatactaatcatgctaaatgcccttaagctacgttagctctctcatggacataaagatggtcttggtctcttggatctcatgtgaaagagacacattgtctcagccaatacgtgttgctaccgtttttccttccgggtactcaacccatacccattctcgacgtgataaacaacttaaagatggtcatggactatttctcgtcaatctaaataatcttctctacaattttcaaacttctaagttggcgttgttcctagaaggaaagagattcatttggtttgcggtatgatgctgttggaaactcttaccggcaccacgattttctcatcatcctactatacggaagatttagtttcatcgtttcgatatgaaaactgtataactagattaacctatatcataaccaaactacagttagataaaataatgggccaactattaaagcgatccatgaacatggcttttggatagcaaagtcatgaaaggtttaccaaagaacttgcaacgcattacatatggttccgacggatacaaattcggttagaagactacatcaagtcatcaacaagcacaccaaactgatgaatctaaggacgcaaagcagaacaaaccaaatccatctgaccaactcatagaacatccaagataaggacactaaagcatatagctccaataatgagtcgaggcaataacttcaatactataatccacaacaaaaaacagaggtccattgtcaatcgccatcacatgatataaaactaagttatatcccggggaagtaagctttccattcacgatcgaactaaagaacaagacagacatgcttttctaatatgacacgagaaaatcacccatccttgtggcagagcacaaacataaaccaaccacagaataattgcaaggacctgaaatgatgcaagtcgatgcatctcaccaatttaaagggtaaaaaaatttcgaatccgacgtatataagtttacagcatcggtgttccaaactggcaaacttcaaaaaaaaagttactaaccatgaaaccaattggtgccaaattgaacagagtaaaaggaaatgatagaaagtttggagtcaaaacgaagtttcagatccatactcaatctcacaatgcacataaaatccttcagagatggtttggtaacaaaaaaagtttccatcttttattcgttgtaagttacaactatagtgtctatacatgatcattagctataaggaacaaaactgtagaagctaacttacaaccaaatgttcaaacttaacagaaaattcaatcttctgacttatcagttccgttcttgtttccatatatcaaaccagtaacctacaaatagcataagaaaaaaccattgatactctaaacgaagaatccacaaatgaatactaaactactaataaatgttggaaatttacctgagggtcagcgattggtttcctcttctcaacgtattgattagtatcagccattgcaagagctgccctagcctaaatcaaaccagagataactgtggaaatgagactagaggattcaataaaaacacaaacttttttggatgtgcaaaaaaatcaaaattggtacctcttgttcctttttaagatcttgttctggcttaatccagagaaagtaagcaatagttccggcgacgacccaagaagcggcactctgaccacctctaagacctcccatggaattaccgatgaaagatctcacgtttccaattgatcttctccagctgctagccattgattgatgcccaactatacgaactggtctaaggttcttctggatctcttctctgacaattgcttgactttgatgatgattcgatttggaactgaaattgcaagaaaagtaaaagcaggcgatttgattttgattcgcatttgcttggtgaacactgccaaaggctaaaccggtcgccgagacggttaatctgatgtttgggattgacacatcatgcggctgttgtttctccacgtaacatttggagacccgctcaaatatattgtgggccggagaacattgttttaccatatagggcccatagactttgaatatgtgtaggtaaataaaatacaatctgtggaacaaaaatggcaaaaatatttgaagtcagcaggattggttaacaatttgagcacagaaatacatttggtaacatctgagcatatcattcatatcatatcgctgtcgaatttgaaggaaaaaaaaaagactaaggaagtggatatattggtgaatgctgatgatgagaaaacttattattatatacgaaaaatttactaaagacagcaatattccaaaataatgatagggaagattctgagatggtgtgtggtcagtgtggaggcactacagatggtcaaacagtagcatacccacctggctatttggacaaggacaaggaagaagaaaaatcgagaaccatcttctcagccgattttagtaaccatcttcttgtttgctccgaacaatcaagagatcgaaaatggctgatgttcacaaaggaaaggtttgtgtaaccggtgccggagggtttttgggttcgtgggtcgtcgatcttcttctctctaaggattacttcgtccatggcactgtcagagaccctggtactgaatcttctctccttttactctcttcctctgtaaattttccgcctttattcactctgatgtctcgttgacttgtgtgtgcgtgcgaagtagaaagtctgttcccaaagtttgatttttttcttaatctactttctaggtgtttagattcgctagtttctgttctctcgacggataaaagccttagcttttgatttttgtttgttgttcccaaatcattttagtttgcttctcttcttttagtgtagttgttgttgttctgatgaagagtttcgcatggttcttgttatagataatgaaaagtatgctcatttgaagaagctcgagaaagctggtgacaaactcaagctcttcaaggctgatttgttggactacggctctcttcaatctgctattgcaggttgcagcggagtcttccatgtcgcttgcccggttccaccagcttcagtccctaatcctgaggtgaggatttcacttcactcctgtaatctcactggggatatataacatagtctcactctgcttccactggttttgcaggtagaattgatcgcacctgctgtggatggcacgctgaatgtgcttaaggcatgcattgaagcgaatgttaagcgtgttgtgtatgtttcctctgtagctgcggctttcatgaaccctatgtggtcaaagaatcaagtattagatgaggcatgttggtctgaccaggaatactgcaagaaaactgaggttaatgcatcctcaatccctcatctcatctcacttgttatatatcacatcttttttttgctgacttttaaattcctctggcagaattggtattgtctggcaaagacacgagcagagagtgaagcttttgaatttgcaaaacgaaccggacttcatctcgtcagtgtttgccctacccttgttttgggacctatactgcagcagaacacagtaaatgctagtagcctggttcttcttaagcttcttaaaggtatacaacaagccttatcattcacatctgggattgttagaagcagcgtggtatacatgggttggtgaatctcgggttttgattttacttttgtgtggtgcagagggttttgaaacacgtgataaccaagaacgtcatttggtagatgtgcgtgatgtagctcaagctttactcttggtttatgagaaagcagaagctgaaggaagatacatatgtacatcccacacggttaaagaagagattgtggttgagaagctgaagagtttttatccacattacaactacccaaagaagtaagtaaacaaacaacacatctctctgcttagttttgtacactcaaaaccatccttgacaattttttgagcgaaaaccttttgtcttgagaacagactaattgctgtcagctcattactgatttcattcaataagcaatgacacttacctttagatcagtgttttgaagtttctttaagacctaactttgatccaacctctacttatccaatgttagatacattgatgcggaagatagagtgaaggtgagttcagagaaattgcagaagttgggttggacttaccggccgttggaggaaacacttgtggattctgttgagagctaccggaaagctaagcttgtggactgaaaacttggaaagaagagcaaaatagtgttttagcttcatatgttatagttatagtgttccattctgcacacacacacacactctctcatcgtttactcaataataagagttgtgcattcaccatggatttctgagtttttgttattttctttttagatatcattacttttattaccaatctacaattttctttccataatattttacaatatctctctattgtatatgttgttccaatttctaccgaaatcttactttcaaaggataaaacacacaaacttttatctcaattggtacgtcttgtttctgtataaatttgttaatcattgtagaaaataacataacaaatgtggatttaagctgaacataaatattaatgctttttccgatgaataaaattagtcgaacaaaagttgagatatggagctgaagcagagatggtcaaagtcaaacaaatagctaccatttgcacaaggaagaatcttcttctcatttgggtgatcaaaaatggcggttgtgcagaaaggaaaggtttgtgtaaccggtgccggaggttttttgggttcttgggtcgtcaatcatctcctctctagggattacttcgtccacggcactgtcagagaccctggtactactctcctcaccttttatctctccctctgtaaattgtcaacctttattctctcgcatttctagttcatcgaatttttgtagctcagcctggtcaaaattgattctttcgtctactttctaaggttttctattcccaattctttttgtagctccgatgtttctgtctacagacagaagattaagccttttgagtttgtctattgttctgatgaagagtttcgcatggttcttgttataggtaatgaaaagtatgctcatttgaagaagcttgataaagctggtgacaaactcaagctcttcaaggctgatttgctcaactacggctctcttcaatctgctattgctggctgcagcggcgtcttccatgtcgcttgccctgttccatctgcttcagtccctaatcctgaggtgaggatttcatttttacaatctcattggtggctatatgcattgtctcactatggtttcactggttttgcaggtagatttgatcgcacctgcagtggatggtacgctgaatgtgcttaaggcatgcgttgaagcaaaagttaagcgtgttgtgtatgtttcctctgtatctgcagttgctatgaaccctatgtggtcaaagagtcaagtgttagatgagaccgcttggtctgaccaagattattgcaaaaaaactgaggttaataatgcatcttgaatccctcatctcacttttttttcttcttttaaatctgactttcgtccctctggcagaattggtattctttgtcaaagacacgagcagaaagtgaagctttcgaatttgcaaaacgaaccggacttgatctcgtcagtgtttgccctacccttgtcttgggacctgtattgcagcagcacacagtaaatgctagtagccttgttcttctcaagcttcttaaaggtattataaacaagcctctcatttcatctgggattgttagaagcagcaacttggtatatgagttggtattgattttatacttaagtgtggtgcagagggttatgaatcgcgtaataaccaagaacggcatttggtagatgtgcgtgatgtggctcaagctttacttttggtttatgagaaagcagaagctgaaggaaggtacatctgcataggccacacggttagggaacaagaagtcgctgagaagctgaaaagtctttatctaaattacaactacccaaagaggtaagcaaacaacagctgcacatctctctacccaatttgagtgaaaacctttaaaccttaataagctgtttttgttactttcatcagtaaacagtgtcacttacctttacatcaatgtctctgaagtttcttttagaccttacctttgatctaaattctacttatccaatatcagatacatcgaagcggatggaaaagtgaaggtgagttcagagaagttgcagaagttgggttggacttaccggccgttggaggaaacacttgtggattctgttgagagctaccgcaaagctaagcttgtggactgaaaactgggaacgaatagcatatgagtgttttgggtccatgtgttaagtgttcctatctgcacacgctctttcatcttttactcaagaataagagttgtgcaacatattttccatcatgaacttctgagtttttgttactttcttagacaccattacttttatgaccaatctacaattactccttccataactatgttccaatatctctttgatacgttccaatttctacctacttacaaaggataacttcaccattaatacatgaaatcagtaacgcacaacttcaccattcgaattaacctctaagcctagcgtagcagatgcactacatcttggctgaccatgggactaaaaaaacattcgcaatatttaacaactaaagccaggttaatggacctgtattagggcccaaaccaggcccgtttagatatccgactttttttttaactttgcccatctcgatagctagattctcttttccctcttccttctccggcgaagttgcgttagttaaacagagagtcatggccatgaaagctcccgatcccggcggatctggggaaattctcccgagcactccctctctttccgaaactacgtctggaggcgccgcagcagcttctaagtcggctcaattgccgtcttcttcttccgatatcgataatattcacgtacctagctactccagtaagtctgcaacgccgagaaaactttgatttattctactttcttcactgtttcttacggattttgtacttgtaccgtctatttaaccaattaggttggttttcatggaccgacattaacgattgcgaggtccggtcactgccggaatttttcgattcgagatcttcatccaaaaaccctaagttttatctctacttgaggaactcgattattaagcagtacagagacgaccatcctcggaagattagtttcactgacgttcggagaactctcgtcagtgatgttgtctctattcgtcgcgtctttgatttcctcgattcatggggacttatcaactataatagctccgcctctgctaagccgctcaagtgggaagaaaaagaggccggaaaatccgccggagatgctgcttctgagccagccacaactgtcaaagaaactgccaagagaaactgcaatggctgcaaagcaatttgcagcatagcttgtttcgcctgtgataaggtttgatttcataatttgtagccatagtaataatttcattcactgagtttgtcacttagaatgattatgtacatttttgttttcagtatgacttgacattgtgtgcgaggtgctatgttcgtagtaattatcgtgttggtattaactcctcggagtttaaacgagttgagattagtgaggagtcaaagccagagtggtctgataaggaaattctgctgctgctggaagctgttatgcactatggagatgattggaagaaggttgcatcgcatgttattggtagaacggagaaggattgtgtttctcagtttgtcaagcttccgtttggggaacagtttgtaaaagagtctgactctgaggatggtttagagatgtttgatcagatcaaggactctgatattcctgaatctgaaggaatagataaagacggttcttctcccaacaagcggatcaaattaacacctcttgcagatgcaagcaacccaataatggctcaggttagaaagacactacaatttgagtagttgcgttctctctctatgttaatcttatttgtataagtcttcaacatgcgtggaaatgcttttacattgttaggctactgaagaatagtccagtgtctgcactaggctgttccacgacttgcgtttttgtctccttaaagaacctaaatctagaataccttgtggggcttactttgaaatctagtaataacaaaccctagttgacatatataaggcatttaagaatcaaatatgtgttagataattctgtactgtgttatcacacctcaattgttatgcttcattggctgtctctgaataagatttatcctatcatgtcctcttcaggctgcttttctttcagctttggctggcacaaatgttgcagaagcagcagctcgagcggcagtgagagctttatctgatgtagactacgaggctgacaaaaacgccagtagagacccaaatcgacaaggtatcaaagaccaagctgtctctatttgcagtccatttctgtcctaagccaaacccaatagtgacagttttgttttcctgatacacagatgccaatgctgcatcgagtggtgaaaccactagaaacgaatctgaaagagcttgggcagatgcaaagtctttaattgagaaggaagagcatgaggtagaaggagcaatcaaagagactgttgaagttgaggttagtaacaatctgcaactttccatagactttttattatatggttatactcaatgatgatttatgttggaacaaacaaaatttgggattaacagatgaagaagatccgagataggattgttcatttcgagaaattggatttggaaatggagagaagccggaaacaattggaggaggtgaggaatctgcttttcgttgatcaattaaacattttcttccacaccagaaaagcccggaaaactgaagatagaatagagtgttagaacgcacttaatttgaaactgttatttcttatttgattcttgtctggttaagaagatgacttgtattgtagtgtacttgagatgtgttggtaacaaaatgagatgagatcgaattggtataaataaggctgggttggtataaaagtcaaaaccaaatggcaactgcgtcgaagtataatttttgtctttatcaggcaatcacaagtggaaaagttttaaaaattaattttgctcttttggaaacaatagaaaatgtcagggttttggagatatccgatataaaagatagattttgttttcactaaataggttaatcttcaaatgttgttaagttaccgatgttttttttgtatctccgtaacatgattactctctttgttgctaaaagagtgatggtttttatattaagaaacagtcattaattaatcatttctgtattgtttgttatattaaacattttcaataactataaaccaatagcagtctaacaaatttcaatcattttatcttgaactttactagttcaggtttttcagacaaactaaaaaaacattgaattttctgttttatctctaattaatgtgttatttaatatcatatcatcaattaatcagccaaaacaataagaatttcttttggaaaatctttcaaaaacatgcattgaaaatataaaacgataactaatttaatacaaaatttaatttctaaaacataactaatttagaaaggagtgagtgatatttaaaaaaaataaagaaaaaacgaaaatgttttttttgtgggacaagttaaaagtggtagaacatcaatttattagaaacaaagagagtgtatttttctttcttccccatcgggaaaccaaacccaatttatttatatattaaactcgtacaatataaaatcttttatatttaactaaaaattcagtaaatatccattcttcgtaaatatttaaactctattttttctttttaaaaagatcaatttacatcttaaattcaaaatataaaccataatatattatgtacatattaatactgcattctaaacaatttcccaatataaaaaataaaaatatatagaggtaaataacttatcataactactttattgatggcctttataattagtttctgctttggtagaattttttagttcagcctttatctcgttatctgcatgtctctaattgagctttgttgctaagttttagcttttttttttcttatgcgatcactttgctggttgttgtgttggttggttcggttccttgtacctttgatgtatcctctatttctctttttatctaggttaagcttttttattaatgaaatattaagtttgattggaaaaaagaggcacattaatagaaagttagctttgttgtttaggttttatttaatatatgtacgtgtgtcatatgtcataggtaacaatcttactatttgattattaagccggtttttgcgtgacggaactcttcttgtatttgccatcaagtgaaagaaagaggaacatctttgccatagtttagtttgcactctctattggtagcttgagttttcagctattcgaatgtggccttctacacctgcttcccttctatttgacatacttatcatgtggtaagctaacccatccgtcaacgaggaagtacaccacatatagtaagtatatatattagactatctagatattttgttaaagattttatgtaaataacttataaaatatattgttattgttttccaaaacaaataaactagttgacacatacttcttaagttcattgttaatttatataatacaacaacctaaacccatggtgatgattacctttagatcactaaaacttttatcaaaaattttgcctaattttcagtagattccatcagagaaacagcttttctacaaaaaaatttcaccaccaaatctcttttctttaaaacttatcaccacaaacacttgtttttctactaacttttttttaatattgtaaaatcttacaatattttaaaagttaaattttgcttatttcacgtcaatttatatgtctcttacaaaaataacaatatttctgcatcaacaatattttcgagtcattaatatatatgttttacaatattgtaaaagctaatgttttttaataaatcttaaattcattgtcaatatacaacaacttggacccctagagatgattacctttagatcaccaacacttttatcaaaatgttttcctaatttttagtagattccatcacggaaactgttattctgccaaaaacaattttacaccaaatctcctttctttaacatttatcactaagactttttcactaacttttctttcaatattatgaaaattaaataataaattttacaatattttaaaagttaatttttgcttattttccacgtcaataatatatgtctctttaaaaaacaacaatacttagcttaaaaagtattatatttctagatcaacaatatttccgggtcattaatatctatattttacaatattgtaaagctaaaaaaaaaaaaatctatcttgcgtgtcaataataaatgtctcttactaagaaaatatcaagattttgtctaattactaattagaaaggaagcactaatttttggggtgaaaaaatatgatttctggacaattagataaaaaacaaaaaaataattggactaaataaaaataaaagataaaagtgaaaatatttaaaaaaattggggataataatccaaataaaaagatttggtcactgggacagattccgcactatatatatattcttgtctaaagaaaataaaaaaccctaaaaaaaagaggcagacagagagatctcctctttgtctttttactttatctcctgaagtttcgcctcagtcatctcgtaagttttctctctctttctcattcaattcaatttttaatgtaatttcttgtttgatttttctattttcttcgagaaaacaaaattctcctgtaaaatttaatattataaaagtggtttctttttcatttatgtttatataattttcatctttaatcttaaattctggtaaccttaatgcgcgatccgcttttctaaagttttgtgagagagaagagatctaaaaaaatccacaattttgttcaaatcttggagttaaatgctgaattttaggccttgttgcttagatttatggcttaaagtttcaaacttttcattggatatggtacaaatcttgtagttaaacactgaattgtgtccctcgtgggcgttgttgctttgatttatggccaaaagtttcaaacttggatatggtacaatcttgtagttatacactgcattgtctctcttgggtgttgttgttgctttgatttatggcttaaagtttcaaactttttcttggagatggttcaatcttgttgttgaaagttgaaacactgaattgtctctcttgtgcgtgttgttgcttagatttatggctaaaagtttcaaactttcttcacttcagagcttcttgaatggaaactatggttttgtggttttggttaatcttctgctaacactttttgccctgttttggtttgggaaagtgagaagaaaatgtcaggatctgagacgggtttaatggcggcgaccagagaatcaatgcaatttacaatggctctccaccagcagcagcaacacagtcaagctcaacctcagcagtctcagaacaggccattgtcattcggtggagacgacggaactgctctttacaagcagccgatgagatcagtatcaccaccgcagcagtaccaacccaactcagctggtgagaattctgtcttgaacatgaacttgcccggaggtgagtctggaggcatgactggaactggaagtgagccagtgaaaaagaggagaggtagaccgaggaaatatgggcctgatagtggtgaaatgtcacttggtttgaatcctggagctccttctttcactgtcagccaacctagtagcggcggcgatggaggagagaagaagagaggaagacctcctggttcttctagcaaaaggctcaagcttcaagctttaggtatgtatttactatatatgtaacaacacacaatgattcttctgacattttggaatcttctctccctcacgtgctgcaattagaaagttttgttttgtgtcggctgcaatctattagaatatagtaaaaatggtgaatatggtagttaaacaatgaccttgagaatcattgctattacaatagacttttatgcccttttaagcgtatctttgtcaaccatctttgctctgtaaatcccctaccaatcttggcatattttgtgtcttgctttgctatattattgacagattctttttgtttcaggctcgactggaatcggatttacgcctcatgtacttaccgtgctggctggagaggtatctatcttcgtctagcttcttgaatttccttatttaattgtacgatgtctgtctaagcttatctgtatagtatacgagttgttgtcttttaaggtcaatcattatttggtaacaagagaatgttgaacttgattagggttatgttgtttcttacctgacaagagtatgttgtgtggctgttagtgttgttaacattttaggtccatttgattttatcatatctaagagctgacatatttatgatttgctgctgtttgatccatgggataggatgtatcatccaagataatggcgttaactcataatggaccccgtgctgtgtgtgtcttgtctgcaaatggagccatctccaatgtgactctccgccagtctgccacatccggtggaactgttacatatgaggtatcaagattcagcttgtaaagttattcaatccctttttactccgatttttttactgctttaatcctagtgatttgtatacactgaaaaccaggggagatttgagattctgtctttatcgggatctttccatttgctggagaacaatggtcaaagaagcaggacgggaggtctaagcgtgtcattatcaagtccggatggtaatgtcctcggtggcagtgtagctggtcttcttatagcagcatcacctgttcaggtattttctgccttcttcaaattcaaaatatttgatatatacatgttcatgagatcaatgtaaggacacgtttggctttcaaattacagattgttgttgggagtttcttaccagacggagaaaaagaaccaaaacagcatgtgggacaaatgggactgtcgtcacccgtattaccgcgtgtggccccaacgcaggtgctgatgactccaagtagcccacaatctcgaggcacaatgagtgagtcatcttgtggaggaggacatggaagccctattcatcagagcactggaggaccttacaataacaccattaacatgccctggaagtagccaagtgatctgtgtcggcttaaaaccaacaacttcccgttattagagtgatttatttctacatttggtttagactttctagttctgatggttatttctacagttggtttagactttctagttctgttcagacaaaaggagtttgataaattgaccgacctattttgtgtgtttgaggtactttcagaaccataggtgttcagaaattagaatgttctgtttaaggtagatcttttattttatgttgaggtactttcggaaccataagttgttcagaaattggaatatcctgattaatgtagatcttttattttgtgtttttcaatcttgaaaacattcaagtcatgtaaaactttttttgattacaacatcaaaacaaggctgggtttaaatctggtgctctttcgctctcttcaataaaaaccgcattgagaaaaacccgagagcgctggtttgcaagaaccaccccattgcatttcctgggtcgactcgtttagccagaaaccacgcatagattccttctgcaacatgtagtaccactgctacaatgaagacagcctttacaatcgtgattgtccggaaaaagaagaggtgtatggctcttaagaaaggcacaggtcctatgtcgggtaaccatccggcagcaaaaagagcagacattcctattgtaacagctatccaagtgaacatggttggaccgtctaaagatctccgcttcctttcctgccagtatgagatagttgcagccataccttccttggagctcttgaatggaacatatccaagctcctccttggctttaagatatgagaaataatgggtaacaccgacctgcaccacatcaaaagtttcatacaagttggtttatgatctcagctggaatatgagttgggaaaaaaactgttaccttgtagacttcagcaggaagaacaaggggctgtggtaaccagctctttgatagccatggatatagcacagtgtagaaaccttggaagatcttacccaaggacagcgcaaaaggtacagagattgtacacttgggcaggtcatagtctaaactttttagtaaaggacgcagaaactcaaaggtattcaccgggtaacctacaacatcgccaatgcaaaatacttcagcttgctttaggaagctagttttaaggtttaagagatgcatttaccgtcagagacaaaatatggttgaccagcagcaacaggttgtccttctctgccaggaatgtcatccaagagtcccatacttgccaagatgattgctaggacaaggttttcgacataaatccagtctgatttgacactcggttcaccgatcttgaagagagccaaacccaactttgttagagtaacaatcctaggaagatgcctatcttcgccaggtccatatatagccgctggacgaatcgcacatgtatacatccgtttgcctccattcctacataagcacagccactgataagcataaaaacctcaacatttcctctattgaagaatcaagaaccagacttacttaaaaggtcgaccattactcttgagaaccaactgttctgcaatcgatttagttcgactatatgcatcaacatgatcatcaagagggaaataaggcaaaccttcattaccattgagaatctctttaccaccaaacacaacattgtaagtgctaacatacacaattcttgtaatctcatgtttaaacgcagcttccaagacattacaagtcccgttgatgttaacctcatcacaacgaccaaaccgaagcatctccttcccagacataccataagaagcaagatgcaaaacacagtctgctccatctaaagcgttatccacatcttgtttcttagtcacatcacctgtgacatcatcatcacaatatataaatccggaactgatctaacactaaaaacttgagattcagaagttacagatcaaattgaaaaagggtttaatggatcgatgaaattggaaccttgaatgcagcgaacgccactgtttttgagatcatcggaccaaggagaagagtgacggaggtcaaaagagcgaacttggcgagcaccacgacgaacgagctctaagcagagagctgcaccgacgaagccaagacctccagtgaccacgaaggtgttaccttcgacaccttcattctcactcaaatgcatttttcttcttctctctctcaaaagttgaccggcgagatgagaaacgacacggcgtctctgacttcttccaaacccagctagctataatggtttgccacgtatacactttaacttaactaatttgatcaggaattgttttttatacttttatttgttttctccccattatggacaaacatcctgtaatttgctaattatactatataatctcatttataaagatagaaaaaacaatagggagaaatatgtttctatttgacattaacatttaatgtttgattgagataatttgaacaagagtaaaactattgaattaaaaatttattaacaaatttaatattagaaaactgttaaattaaaaataaatatattaacaaatcgaatttttgtgaatttcagaaataaaaagaaaattcttgtgtaagtctaaaccagtccttaatgttcttcatttatatctctaactgcctgtgacttcgtccccgagagacactctctgattgataaaattcaagcagatgaaccttttaagtcctgaaattttcctcactagtcgacttaatcaagtgctatacactcggtcaagctcatgatgttagtgtaggagctgagtttagggggaaaaaaagaatttcgaaaatctattgatcttcaattttttaacgagttcaaggtttttaggtttaggatatttcctctagtaatctagggtttatctggtttcccgagataaattaattaggggttgtgggtttcttcattgcaatggcgagaagacatggatggcaacttccagctcacacatttcaggtttttttccttacaatacttcactgagagtattgattgggttctgtctttgactttggttttaacgatttgggaaattcctgtcgtaatctgctattgtgacaagtttgttcctttttctaatccttttgaaaatgacatcaaatgttttgttcgtatctggtagtttactttgttgtgatatagtattcacatagttttcaaaatcttttctttttcctctgctttatgtgtttgtggataaaacacacatttaagtttatgtatatggttatctaacatggtctgttgctcatgttgctgtgcaggttgttgccataactgtatttttcttgctaactgtcgcttactatgccttctttgctccatttcttggaaacaaactctatgaatatattgccattggtgtttactctttcctggtaagacctaaaacgaaacattgttacactaagctctcagttgcattaaacttgttctttatctcacatctctcatcactatggcaatttattcatagagtttgcataatgattttacaggcgttttcggttttagttctttacatccgatgcactggtatagatcctgcagatcctggaatctttgtgaaggctgataacactccagctcataagtcacagaacagtaactatgttcctggtacgttctctacccgatgatgttgtgtataaggcttacataaatcggatacttctttcttatagtgatgtctctgttgcagagaatgcttcagcaattgatggtgggccatatattagacacggctcaggttgctgtagtgctataggaagattcatttgtggttgtttagtaatacaagattgccgtagagatacccaacaagagcaatcaaacgaacaagaagaagctttgttctgctcattgtgcaatgctgaggtatagtacatttttaccttctggttagaagcttctcattgcatcttgtactgtaacagcacattcttttcttgaaggtacgtatgtttagcaagcactgtcgaagttgtggcaagtgtgtagatgggtttgatcaccattgccgggtaagcaacttgaaaattttattgtttttgttgggtttctgacttagcaatttaaactgatatgttaagtttctttttgccttagtggctgaataactgtgtggggcagaaaaactacatcagctttgtgtgtcttatggcagcaagcttcttttgggtatgtttccaacacagtttgttattttaaggttgtttctgcctacgctttatctcatctgataatattttaacatatccatatgatatgactttgcaaatatggtgtcagcttatagctgaatttggagttggtgttactgtatttgttcgatgtttcgtggaccaaaaggcgatggaacatcttataactgaaaagcttgggcttgggttctcccgtcctccatttgccgctgttgtggtaagtattctcaaagaaaatactggtttattctgttttctatcaatgcttagtttccgacttgagcttgctttctcattctgcaggttgtttgtacaactctctcgttactggctttgatacctcttggggaacttttctttttccatatgattttgatccgaaaggttttgtatatactttttcttgcaccattttttgaattctacgctccactgacaaacacataaggaaacacaaagctgagcgttgatatgtcacttttgtggctgtagggaatcacaacatatgaatatgttgttgccctgagagcgcaaactgaaccacttggaacatctgtagatgagctagaccaaacaagccagtatccttcacctgcaagctcagctgtgacagccacgagtgctagaagctctctcggattgagcattcaataccgtggtgcctccttgtgtacacccccaaacatattcgtggaccaacaggtaaaaacaccaaatctcttctgttttccgctttcttcagttgtataataaattttgttttgccaggacgatgttatccagcatttggagcctggacctgtacgatccacaatagatcccgactcactttcacagaagaagccacctcagcgtcaacaagtaaggatcaatccatggaagctggcaaaacttgactcaaaagaagcatctaaagcagctgcaaaagcacgtgcatcttcatcagtgcttcttcctgtaagttcgcggcaaaacccttacaaaaccagcagcaatgtaagcgggagaagcagccccggaagaggcaaacctgctgattcagagtcttgtagccttagtagtccaggtttgacgagagatcacttcaacccaatgtacatgtcatcaccagctaacgagtcacctttaaacgaggaagaaagcagaaatgctgttgttgcagctagaagaaacttgccgtcaagcgatgagagttcagtagtttgggatccagaagctggccggtttgtatcgttgtctcggattcccggaacagatgttggaggtcctcttggtaatgaatgtctcaacaccataacttctactgggactgatcgtagcagaagggctagaggaaacccattgactggttattttcaacaggttagatcacagagaggagaccaacttccagtgtttatgcctactgattctcaactgcacagacatttatctactagattccattagaaacattttgtagatcaccaacttatatgtttccattcaagttttgtttcttatttctctttttattttcttgccaattaaggagacagttttattggtttaatggtagggaagaaatttaaaacaagatttagaactagtttgtaacacctggttattattgaaaattgccaagaaagaaagaaattaacagtattgccgtgagaataaggatacacatgcattacgcagcatctcggaatagctagatgagtgatgttgcatacagaacttggatctggtttaggtaaataagtagagttgatgcaaaaatgtatctcctctaccatcgtcgccattttttgtttttttttcaagaatgaacaaagatctttggaataaataaattagggtttaatttcttcttatttgtaacgtctttgagaaggtattttaggtctaatcgacttctctatttactatttagataaaatatttaaataaatacagaaaaagggtatcaacaaggttggtctatgtagtatagtggtaactggtaagccccgatccgattacgattcaaaaccagtagaactacacaatgaacaaacaagcaaaattttacaacaaagagatagaaaagaacacacaccactcccatcatatagtggtttcataaatcatatcaacaaccgctaagaactcacggcactaggctctatcttagtcgtaacccaaatctccatcacatagccttcaaaaggttgaaataaaactgcaagctgctcttctccaaatgcagatagagtcgcaatatcataattagcctcaaacggcagaggcagagtcacgtctcagtttacaattacaattacaattaaaatgttaaataagatttacgtagcaacaaggtcgttgtagtatagtggtaagtattcccgcctgtcacgcgggtgacccgggttcgatccccggcaaaggcgtcttttttattttgaaaattttccacaaatccgctgtgtcgttcatctttctacatttccgattcaaaaccattagagctacacaaagaacaaacagagcaaaagtttccaaaacatagaaacaaaagaacacactacaatcaacctcatagcctgaaaagacgatcgtatctccttcatagcatccttcatagcatccttcattgcattactgaaatcaacaacaataagaacacgcagccaaggaatagaaaacaacaagaatgaattacggcaaaacttcttctgggactgattatagcacaagggctagaggaaacccattgacatggttatttgactctcaacaccacacccacaccaattcctttcaggtaattttgtttcttatttctctttttcttttttttcttggtaatgtgacagttttgttggtttaatttgtaacatatctgagtagaaagaattttaaaaactgtataattcaccggaaatattcttcaaaatagcaaaaagaaaatggtgtcaccaagagaaagttatctcataggaagagaagaagactcctttacttacaagtttaaaagaaacattaatttttcaagtgaagctttccttcatcatgtagtgctcttagaggagtacaaaacaacaaaaacgaacatgtatgcttcaagttgtcaaagaaggctgagttcatcaaaaggagttggaactaaataagctcaagaaagactttttttttatctatgtacaatgtataattatatagcatatagcatataaccccaccccatatgcttagcagttagcaagctctgtcgaactacatcagctttgtatgtcttatggcggcaaatttcttctatgtatgtttctaacaaagtttgttacttgttaaggttgattctgcctctgttttctttcatcggagtatacagtagctggctgagtgaccacttgccagctagctaattggtcctggttctgatattaggaaaacaagcagaattgatgtcaaactgtaacaaacaaaaatttctaacgtttcttatcaaatccaaaactcaaaagaacactgaacttggaacataagaacatgtaagaaagaaatcccctttttctgtatgtaagaaagaactttggaacataagaacatggagattgacactatttaaataaaccctgttccacaccttcgcgatcccaagaaactctccttcccttgcagcttctgctttactaatgtgctttgataaagcgttccacgttttgcaagtcactcggacttctctcatcgatttcactggaacccttgagagtatttcctctaccaattcccggggaagatcggacatcttctccatatttttttcttttatggtttcaacaatcaacaaagatcgttgtagtagaattagggtttcttcttatatcccacgtctcagtttatagattaaaattaaataagtaaataaaactaacgtagcaacaaagtcgttgtagtatagtggtaagtattcccgcctgtcacgcgggtgacccgggttcgatccccggcaacggcgtattttgttttcctgttttatttttttgaactctgcttaaatatttttattgaaatttcccataaatccgcaaagtcgttcatctccctacatttccgattcaaaaccattacagctacacaatggacaaacagagcaaaagtttccaaaacaagaaaaataaaacccaaaaaaaaaaaaaaaaaaaaaaaaaaccagaaaatcaccatcaccggaatccgtctagcggaacgacggagacatcttccttctttgcatgttaccgccgtttcttggccgtagaagatataaatattgatagtcgtatataaaaaaaaaacatataagacaaggtacataagaaaaaaacaatttcgttaaagaaaaaatggctggaggaggaggtggtagcacttctggagaaggtcctagagagctcgatcagacaccgacatgggccgtctccactgtttgtggcgttatcatcttgatctctatcgttctagagctcatgattcacaaaatcggagaggtaataaaaactaacacaatttctcaaagattgctctacattttatgatttcttattacaccagtcattgattgttctttcgcaggttttcactgaaagaaggaagaaagctttgtacgaagcgcttcaaaagatcaagaacggtaccaaaccctccaattgatttttttttttttttttttcgtgggttacaagttttagaactttttgtgttattgattttgcagagcttatggttttgggattcatttctttgttattaacatttggacaaaactacatagcaagtttgtgtgtggcgtcaagatacggccatgcgatgtccttttgtggtccatacgatggtccaagtggtgagtctaagaagccaaagactaccgaacacttagaacgtcgtgttttggctgatgctgctccagctcagtgcaagaaggtcaaaatctttctatatatatttttttttttgcttaattagataacatggttgaaattgatgaagatgaatgtttttgatgtatgcagggctatgtaccgcttatatcactcaacgcgttgcatcaagtgcatatcttcatctttttcttggctgtgtttcatgtcatttatagtgctattaccatgatgcttggacgagcaaaggtatatttgcatatataatgtttacttaatgtcgtagcaatgtgtatgtgtttgtgagattttgattgttggattatgcagattcgtggatggaaagtttgggaggaagaagtcataaatgatcatgaaatgatgaatggttagattattgagcttatagttacagatgccattcacatttcaaacaagaatatcaatttcttattactttggtgtaatttacagacccttcaaggtttaggctcacacatgagacatcatttgttagagagcatgtcaatccttgggccaaaaatagattctcattctacgttgtaagattttgatcgtttgtttttattattccatctcttgtttctatgtatctaaagcaagagagactttccttgttactctgttttgtagatgtgtttctttcgtcaaatgctgagatctgtcagaaaatctgattatttgacaatgcgtcatggtttcataagtgtaagttccttgagattatgcaaaaccattctttaattaatttctccccaaaacattgtttgagatatgtttccaaaatcctcggttacttaggtccatttggcaccgggtatgaagtttaatttccaaaaatacatcaaaagatcattggaagacgacttcaaggtagtcgtgggaataaggtacatcttaatacttcttcttcttacaccaacgatcctatattcatcattttcggatgcaatttcacaatcattctggtaatgcagtcccgagctatgggcctttgtaatgctctttttgctctttgatgttcacggttagtctttttataatcttgtgttgtaatattcttcaacatacaaagcttagaagctaattgttcgcggtatagggtggtatgttactgctgtgatcaccatgattcctccacttgtaagtaactgaatctacctttgtagcgtgtgctagcttccacggaaatagcaatataaagaaagaaccgactaattgtgtttggtttgaagttgacattagcgataggaaccaagcttcaagccatcatctcagacatggcgttggaaattcaggagagacacgccgtgatacaagggatgccacttgtcaatgtctctgatcgacatttctggtttagtcgtcccgccttagtcctccatatcatccacttcattctcttccaggtacaactaatcgccgcttacaaatataaaacaatagaaaagtatgttttcttggttcgtctatcttctaacgagcttacttaaatgttcagaatgcttttgagatcacctacttcttctggatatgggtaaacaaatacaactcacaactctcttttcccatgatctctctctacttctctcactctccttccattgttgcagtatgagttcgggttacggtcctgttttcatcaccatttcgcgctaataatcataagggttgctcttgggtgagtacttcttttgtgaaatttggttttcttcagctacaagaatcttcttttgtgatatttggttttcttgagccacaagaatcttatcttgagttctaaatgcagggtgggagtacaatttctctgcagttacatcacacttcctctttacgctctcgtgactcaggcatgtcaaaagatttatacttcattctttctcttccaataagagtaaaaagccgccattgtaaacactctaaagattttacatgttttttttccagatgggatcaacgatgaagcgatcggtgtttgatgatcaaacgtcaaaggcattaaagaattggcataaaaatgcaaagaaaaagagcgaaactcctggtcaaacgcagcctccattgcctaatctccgacctaaaaccggcggcgatattgagtctgcttctccggccaatatcacggctagtgttgatgttaaagaaagtgatcaatctcaatctagagacctcttaagcggtccctaaaaaaccaaacgggtcaagacattactttcacttaaccggcttactctaagtctctctacacaaattttcttttcaaattataggttttaatcatttattcatgtaactgtttgttgtatgtgtatcacaattagttcaattctgtaccagcttatcaaaatagacttactacaaaaacatgagcctatagggtcaggtttggtaaatgggacaataccaaactaactgaccaaatgtttggtttaacttatttcggttaactcaggttttgttcaattgcctcgagtcagtttataaaaccttaaattttaaaaataacgccctaatctcgaatcgtccgtcttgagtttttcgccgtcgtcaccatttggcagccgtcacctccgttgctactttattctctcacaagtccccgccttaacttgagctaaactgaaggaggttgatattgctctgttttctaaaaacacatttctgcacacaacgtgttcgatcaaatgcctaagagatacatgtgatatataggacgcgtcttctcactcatttttttttctgaatgtttgtggttattgcagtaattccatattcgcgtctattaaattcatgggagacagttaggccggagaaatgaagaggcttagactgaaaatttttggttgttcttgagtataaagtaaagtacctatctttctctggtatggttgcttactcataatgcctaatagtttttgaagtattttaagtatcaaattgatttgatatataagcacattgttgagtagtttgaagtattaatcagagataatagtgttaagtatttggaattcaattgaactagcgccactaatgttggaattc

SEQ ID NO: 325 - DNA, 114144 bp, Arabidopsis thaliana
aagcttcaagccatcatctcagacatggcgttggaaattcaggagagacacgccgtgatacaagggatgccacttgtcaatgtctctgatcgacatttctggtttagtcgtcccgccttagtcctccatatcatccacttcattctcttccaggtacaactaatcgccgcttacaaatataaaacaatagaaaagtatgttttcttggttcgtctatcttctaacgagcttacttaaatgttcagaatgcttttgagatcacctacttcttctggatatgggtaaacaaatacaactcacaactctcttttcccatgatctctctctacttctctcactctccttccattgttgcagtatgagttcgggttacggtcctgttttcatcaccatttcgcgctaataatcataagggttgctcttgggtgagtacttcttttgtgaaatttggttttcttcagctacaagaatcttcttttgtgatatttggttttcttgagccacaagaatcttatcttgagttctaaatgcagggtgggagtacaatttctctgcagttacatcacacttcctctttacgctctcgtgactcaggcatgtcaaaagatttatacttcattctttctcttccaataagagtaaaaagccgccattgtaaacactctaaagattttacatgttttttttccagatgggatcaacgatgaagcgatcggtgtttgatgatcaaacgtcaaaggcattaaagaattggcataaaaatgcaaagaaaaagagcgaaactcctggtcaaacgcagcctccattgcctaatctccgacctaaaaccggcggcgatattgagtctgcttctccggccaatatcacggctagtgttgatgttaaagaaagtgatcaatctcaatctagagacctcttaagcggtccctaaaaaaccaaacgggtcaagacattactttcacttaaccggcttactctaagtctctctacacaaattttcttttcaaattataggttttaatcatttattcatgtaactgtttgttgtatgtgtatcacaattagttcaattctgtaccagcttatcaaaatagacttactacaaaaacatgagcctatagggtcaggtttggtaaatgggacaataccaaactaactgaccaaatgtttggtttaacttatttcggttaactcaggttttgttcaattgcctcgagtcagtttataaaaccttaaattttaaaaataacgccctaatctcgaatcgtccgtcttgagtttttcgccgtcgtcaccatttggcagccgtcacctccgttgctactttattctctcacaagtccccgccttaacttgagctaaactgaaggaggttgatattgctctgttttctaaaaacacatttctgcacacaacgtgttcgatcaaatgcctaagagatacatgtgatatataggacgcgtcttctcactcatttttttttctgaatgtttgtggttattgcagtaattccatattcgcgtctattaaattcatgggagacagttaggccggagaaatgaagaggcttagactgaaaatttttggttgttcttgagtataaagtaaagtacctatctttctctggtatggttgcttactcataatgcctaatagtttttgaagtattttaagtatcaaattgatttgatatataagcacattgttgagtagtttgaagtattaatcagagataatagtgttaagtatttggaattcaattgaactagcgccactaatgttggaattcttatgttcaggctgcctcaaaaggtgttgaattccatgataaaggctcctgccatgaagggtaaattttgtttacttctataaaaatttgtcatgcattttcattgggaatgatttcgagctatatatcctttagaagcttatagaacttactgtaaaggcacaaactttttaaggattatcagagcggtgctcgcaatggcaatttcgtaacttaggatatgatttccgtaagctgaaccatatgcggatctaggaatgaaaatagcatagtttaagcaatcatttctaagaatttgtatcactattcattatctttgttattcctaaattattgaactctcgcaaaatgaagaaggaagaatttcaaagtagactatgggattcatggggatgtaaactttagcgttaggcttaatgtgggttgtttttcatgcactatgttagtaatttggtttttgaaagtttctccttgtgtaattgacagcaataaagaagaaacttgagaaagatatttacggagttggaagtattggccttttcactgatttagacagagaggtacagaaatacctatatgtctgcatgttttatggtatttgattatcttttagtatcatttagagtgattttaagtcaaaatgatcagagtttagcgattagacagaaacctgggttggaagaacactctgttctagataaatcgagaacaacgactcagtgagtacttttcctttccattagatgatctactttgacacttttgctcttagatagtattcaactattatttagtgtctaataatatgaatatttcattccttactatcatcagcgtgttctgtgcagggacaaacaatgttctataccaatgcatccaagtacctttcaaacagaactcaacccgcatacttccacgttattaaaaaaactgactcatcattcacagcaaaggaacctcgtggctggacgtgcagttcatggacagatcatcagaacgggagcatcaacctgcatccaacatgccaatgtccttgtcaacttttatgcaaaatgtggaaaattggccaaagcccactccatctttaacgccataatctgcaaggatgttgtgtcctggaacagtctcatcactggctattctcagaacggcggtatctccagctcctacactgttatgcagctgtttcgtgagatgagagcgcaagatatactgccaaatgcttatacccttgctgggatttttaaggccgagtcgagtcttcaaagttctacagttgggaggcaggctcacgcgctagtggtcaaaatgtcaagttttggggatatatatgttgatacttcgttggtgggcatgtactgtaaagcgggcttggtcgaggatggacttaaagtgttcgcctatatgcctgaaagaaatacttatacatggtctactatggtttctggttatgctacaagaggacgcgttgaagaggcaattaaagtcttcaatttgtttcttagagagaaggaggaaggaagtgatagtgactatgtcttcaccgcggttctcagctcgctggctgcaaccatatacgtaggactaggcaggcaaatccattgcatcacaattaaaaatgggttgcttgggtttgtagctttgagtaatgcgcttgttacaatgtattcaaagtgtgagagcttgaatgaggcatgcaagatgtttgactcgtctggtgacagaaattcgattacatggtcagcaatggtcactggttattctcagaatggggaatcacttgaagcagtaaagcttttctctagaatgttttctgctggaatcaagcccagtgaatacacgattgttggggttcttaatgcatgcagtgacatttgctatctagaagaagggaagcaacttcattctttcttgttaaagttgggatttgaaagacatttatttgcaactactgctttggttgacatgtatgcaaaagccggttgtctagcagatgccagaaaaggttttgactgcctacaagaacgtgatgtggcgctttggacatcgcttattagcgggtatgttcaaaactcagataacgaagaggctttgattctgtaccgcagaatgaaaacagcaggtattatcccaaacgacccaaccatggcaagtgttctaaaagcttgctcttctctagctaccttggagctcggaaagcaagtacacggccacacaatcaagcatgggtttgggcttgaagttccaataggaagcgcactttctacaatgtactcaaagtgtgggagtttagaagatgggaacctcgtctttagaagaactcccaataaagatgttgtgtcttggaacgctatgatctcaggcttgtcccataatggacaaggagatgaggctttggaactgtttgaggagatgttagcagaaggaatggaaccagatgatgtcactttcgtgaacattatatcagcgtgtagccacaaaggttttgtagagagaggctggttttatttcaatatgatgtcagatcagatcgggcttgatccaaaagttgaccactatgcttgtatggttgatctgctgagccgtgcaggacagctcaaagaggcaaaagagttcatcgaatcagctaatattgatcacggtttatgcctttggcggatactattaagcgcatgtaagaaccatgggaaatgtgagctaggagtttacgcaggagagaagctcatggcccttggatcgagagaatcatcaacttatgtgcaattgtcaggcatttacacggctttagggcggatgagagatgtggaacgggtttggaaacacatgagagcaaacggggtgagcaaagaagtgggttgcagttggatcgagctgaagaatcagtaccatgtttttgttgtgggagatacaatgcatccgatgattgaagagacgaaggatttggtttgtttggttagtagacagatgatagaagaaggattcgtaactgtgttggattcgtcttttgtcgaagaagaagaaggaacacaattatctacttctttcataatataaattttttgttgaaattttttatattgtaggttttaattttaggtgtgtgagtgtaactttaggtgtgaaaatgtatcacaaatagtaattcttttgttaaccaaatgattattcactttttataaccatatgccatatagtgttaaattactgaatgttttgtttccattcattgcaaattagacaatgcatgcatgctttagattttagaactttgaaataaagagaaattgagatttagctaaatgtggaaataacctagtcaaatacactccctagttcgatggccaattttgtgcaatttctttggacaataattatttacgtctccaaatatattgtcttcacacacaaggaagaaaaaaaaaaagaagctaaacttaaattcaagaaatatgtcaggaaatatgtcgaagagtgaagagaaacaagagttgccactagaaacaagtccgtatacaaagtacgaggatatagaggattacaagaagaatgcttatggaacttccggtcaccaggacgttaagcctggccacggcggcggcacaaccgacgcaccgaccccctccggtgatgctgctccctccgccatagattccgctaaccaaaaagctaagaagtgaaccactcacaaaatgtttctcttgattctgttttagttactctccaatgtgattcatttgacgcattgtgataattgacatgtttttgttttttctccttttctccattgatatgatccaatctaagatcaataaatagatgtcaagtcgaagggattttggccatcttgcaacattaacaacccacgttatgtatattctcaccttgaaaaacagaattttgcgaagaattatacgccaaatttgtaaaaatatttggtcaagaaaactctcgtacgtgtcatttcatgacatatattgtagcacaagttgtggtgacctactgattgtctgatcgatagcatattagaaaagaaataaaatgaaccttaaaagtcaaatccttaacaactactagcaattaacaaacatgtttgaatagaagtttcaagaattcacattgaaaactttactctctcttttcaaacatgtttcatcaaacggaaatgtaatatttagtccactaaatctctaattaaagtcagtaattgatagttacaaaattaatatgcttcttccatcggtatgaattaattatgatgcccaacaggcaacaactagctaccaatttgatttctaccggctttgatcaacctaaaccggaaataaatttctcggtaatgtgaacacagccgcaacattagctgaaaccaatataattacgacacgtgtatggcgggaatcagacgccgcaactttaattttttaatcggaggtaacccctcgccattgggaaagacaaaaggagatttgcatggtagcgatcttgaccgtcgatgttctatcttagagatctaatggttaggaatttatggcggtaccacccggtcaaagtaatgcgtaccgtcgatatttgacacgtgtcggtaatttagctccggtttgacagatagacgatacgagagattacctggaaacgccggtggccaaccaaataccgaacgagacaagcttctctctctctttctctatctatctttctctctcaaagaaagcttttggaaattgtctttcgtcaaattctgttcttcttcttcattaaactcataactttttctgggtttttcgagaatttcttcgaaaggatcttacggtaagagaaaaggaaaattaagagggaataagaagattcatcatcattgtcatctgtggggaatctcagagcttttttttctgtagttttgttatctttctgaattctctacctgcttcaagatttcatttttattcatcgatctttggggtttagtttcaaagctgaattctttgaggtttctgaaatttgcgagctgggtttttgttgaaataggcttctgagttttggttatatttgtggataatcgattacttgatctgacctgagaaaaagtagaaacctttgagtagagctggttctattacaaagttgtgtttgggagcttgctacaagaccattggatttcttcactttcttcatttgttgagtctgctacaagatcaaggatctgttgattttgggtatttgatcaaaatctgaaattgatcttgtggaagtaaggttgctgtagttgtcaaggtctttggtgaagtttgtttctcacaaagtttgatccttgaagttggtctctattgatcttagatctagtgtgaataaaggaagtccttggaaagcagcagacttgaaaacgctatcacaagaggaattgcttcctgaagagactgtctggattgctgatagatttatatgattcagagaagaactcaccgatgagtatggatttttcacctttgttaacggttcttgagggagatttcaacaaggataatacttcttctgcaacagaaattgatactttagagaacttagatgacactaggcagataagtaaaggaaaacctccgaggcacctcacaagcagtgctactaggctgcagcttgcagccaatgcggtaatatacttgaccctgctttttctttttccttttctttgttacaatgggattcgaatgatgtaactggtttctgtttgtgcgcaggatgtggatgtttgtaacttggttatgaagtcacttgatgacaaatcagagtttctacctgtataccgatcaggaagttgtgctgagcaaggggcaaaacagttcatggaagatgaacacatttgcatcgatgatcttgttaatcatcttggtgcagctattcaatgctcttctcttggagccttctatggggtgagtttatcttccaatcttacccaaagaagcataaaagcaattcactagcctgattcttctttcttctcctcttttgtactagtacgatataagaggtattacttcaaaaactcttctaacatttgttgattgtgtgtcctttggcaggtatttgatggccacggtggcacagatgcagcacactttgttagaaagaacattctgagattcattgtagaggactcctccttcccactatgcgtaaagaaagcaattaagagtgctttcttaaaagctgattatgaatttgcagatgattcttctcttgacatctcttctgggaccactgcgcttacagcttttatttttggacggtaagagcatttaaattcgtatttatgaacttgggaagctatatatgttatcacctgtataatcatcaatacttatcaggttgcctgtgtgtataagatagagaataaggcttagtgtaaagacttatgtaacgggctgttttaccatgtttctttgtagttttgatgtgattttgaatagaattgctactttctttctttacaggaggttgataattgcaaatgctggtgattgccgagcagtactggggagaagaggtagggcaattgagttgtccaaagatcacaaaccaaactgcacagccgagaaagtaagaatagaaaagttaggtggagttgtgtatgacggttacctcaacgggcaactatcagttgcacgtgccattggagactggcacatgaaaggtcccaaaggctctgcttgtccgctaagcccagagccagagttgcaagagacagacctgagtgaagacgacgagttcttgataatgggatgtgatggtctgtgggatgtgatgagcagccagtgcgctgtgacaatagctaggaaggaactgatgattcataatgatccagagagatgctctagagagcttgtgagggaggcccttaaacggaatacatgtgacaatttgacagtgattgttgtgtgcttctctccggatcctccacagaggatagagatccgaatgcagtcacgggtgaggcggagcatatctgcggaagggttaaacctactcaaaggcgtgctcgatggctatccgtgagcatgttatgttgtacgttactttgtgagactattgccaagttagagagagtgtttacaggtttattgacatgttgtgttctgagtatgttgttgttaccaatattagtagtattcaacatccattgagattttagatggatgcatattatcccattgtaaataatttttaacttgttccaccaaattcctttcattaaaaaatttatcagaattttattatttgcatttaggccctcatactattaggacagttcacattaacccctatatattcattatatttaaagaaacacttagatctctgtttcaatttagcaaatggaaaacaaaagagactttagtgtttaagagaagcgtctctaccatgatgaagacacgagcttgttcgaatccgatgaatgaaggagtaaacttggaacagatcccatacgatctcgtattggagatactcttgaaattgtcggcaaagtctatagcgagatttcgttgcgtatcaaagctatgggattccacattccgcagtcgatatttcactgaactgctctttatcatatcgtcttccatgcaaatttagacgtccaaggatctgaagcttatggcaagtatttaggattagcacagtcgttatcttatttgattactatatttttttttcttggtacgtatggtattcatcttttcttattggttcatgcaatatcttgtgaaccatggtgttataagttttaaggttactcttcttttcatcatgagcgataagcgactttggaaattgtgtctttggtgagctctatgttattcatttatccattggtgaaaaccacattacaattgggctaaagaatgtagttttcgagattgtagatgaactaaatagaccattgccaacacggtataacttatttaaagcaaaaatctgcatgtatacaaaaggaagatatacagtacaaacataaagatacagatatataaagtttccatagcaaccttaattagattgttactatacaatacaatgttcatcttttcttgggtagtaaacaatactacttattttcatcctctagtgtaaagacttttgtaatgcgctgctttacaattattctttgtagcttttgtttgattctgaatagaaagaattgttattataaaagaaaagtaaacaaatttaaattatactttttattcaagttttgcaaattctcttgttatattacaacatgtttgttttcttacttaacgccgcaaacacaatgatcagaatcaaaacggtttatagtgttttttccctgctgtgcacacataagtttacaagcagagaaagactgctttaatgtacaaacgcaaccgccatatagacaggcaacaggaattgcacatggtactttgtttttgcaatctgagtctttgtgacatcttttgctttctgtcatcgtcataccttcaaatagattatccaaaagaaaacaatactagataataatttttaaaaagttgtaagtgttcaatttggataaaccaaatgtatttgaaccgcctagttaagcataacaaactgatatgaaaaaccgtacaatttttttgttaacattagttttatatatcctaaaaaccaaaaatcgatttataatccaataaaaaaatatggctgctttgccaattcaattgattctgatctgaaactaaaaccgcaatttttgtttgtgttgattacttgattactgtttttaagaaatctttaagctcacaataaagaaactaacaaattgaaaattcctagataaattaattcatttgaaaaaaatgaatctaaaattttcatattttacaccacagcaaatagcacttgatattgaatcaacattaaatagtattcgttcttttacttttaaaaatccattaaaaatcagggtatcacctatatgttatagtcattagaacataaatataaattatatatgtgtgtgtttcattgttatacatattaacacactgatatatgagtaaatgaattataatatatttgtatgagtgaagaactcacagaagggtgatacaaggaacaagattaaaagaagcctgttttctttgagttcatctctatattttttctttcttttttctttttgtattttgtttgttgtgatttgtgagttatgatggtaatttgtgttctaaattgggtttaatatattaggatagtttttatcctcttttatgaggtcaatacatacaaatgattttggtattaaaatgtttagatttcatacctatattatttattatgattaattgagaaacactatataaaacaatagcaatttatgatatcatatactattattgtttaatgaatctatacgtaaattattatgttttgatgatacatagcatttaacataaatagtgtagatttgatagtgtccacatgtaatcatctaagaggcatattagttctgattttaattttgtgatcgcgattctttgtggatttgtccatcaaattacgtgatttttttttttttttgcaaaaaacaggttaaatggttctgattactcaataaaacacacaagatgtgaatttgatttttaaaaacataaaacatattttcacagataataattttcatgaataatttttcataatgttgaacctttttctccattcagttatttaactggtgaaagatacacttatatgaaataatcgcaaatttgaatagaacaaaaaaacttttactacatgttttgttttatacactagcagtcgatatgtgtatcctatataataatttatttataataattttacttgaatcgttttttaatcgtttcatatgcagactgttacctagtttagtttcatttttatttaccaaccatttcatcattcaacgcgttgaaaaatatatgagcattggataataagacagatataaatgtaagtacatatttaaaaaaatttagcttatgttttggaaactcgaacaccctcatcatgtgtataccctctatatttgtttttgaacttttttttttatctctttcgtacgtgatacaaaaggataaactagcaagctacttcggagtggaaagacataaagcaccatgtacgagcttttttctacctgatatactcgacccaacctgatccgaccggtccggtcaacacattatctcatttgatcggtcgatcaggtgaggcatgttgttgtctccgtcggtcatcttctgtggatatagtcgtcatgacctatcaggacgttttccaagctaagtagtcttcatcccattcttgcatagtcatgttcaaaatttatatatttttcatccataaggcctgattcctagctaaatccactccatagactctttaaagactaccaaaatgaagtcgtaaagagattaagcgcctaaaatgatcaaagccggaggtcaatgcgtttgataacttggacgaagagatatttatgccattaacatgttattttcgtcgtttgtggatactaatgttcttcacgttttcaccatcctccaaatttggtcttagcccttgatgattcaaagatgaagacgaagaagacagcatattcatggacaagttggcactggaatcactacttcgagattgaaagtggccatattgatcaagaagtatgtcaggagcaattggtggaggtggactaggtggtgtcacgataatgcgatcatgggaagtagcgggcgatggatagagttgagtagggttgacacgaatatgctcggggaagttaagcttggccttgtgacctctaaactcaaatgcagctttatcatacgctaaggcggcttcttctgcagtgtcgaacgtcccaagccacacacgagctgccttgttcgggtcacgaatctcagccgcccattttccccacggtctttgcctcacgcctctgtagtttcgttgcctcgagttacttttttctgtagaaaaatgatgaaaattgtaagttcactcttgtcatgaaaatggtgacttaaatgtgacgtgcatgtctatgaatataacgtatactatcggtgtagaggcatttcgtaaagattattaaagggcgtttgaatcatatgatatgatcattctacatcaacttttattcccctcttctacatctacttatgaaatctatatattaggccaaacctacatttatacattcctctctctcgtaattggtaattaactatatatatacttatgtatcacaccaatgatataattaggatataaattaagtttgatcattttaaatacgttttccccatgttacaatcctaaaactctctctggctagttatctcaaccaaaatacgaccattgcaaccaagccttgccaatcatatttgtccgaaagccaaatatgatcaattttgtccaaccaataaagccgacaggttttttcaagaaaatctaaccatgaacattcattaaaaaaatcatatagtaaattgaactaatgcattgtggccatacatgaaattatatctctatttgatcaaggccatgctgcagccactaaaggattaccaattgcaaaatccaagattaaatcattcctatgtgtaaagagaatcaccaatggaaaagacaatcactcgagttataaagtatagcaattaaaattattggaaaaaggatctgatgaaattaccttgaagagtaagcgacgaagattgatcatcaatggatgatgggatgggttgaccagtgagttcagagacaaaatcagacacatcagattccgacaaagttgagcaacaacacaactcttttttctcttctctatttccggccattgattctggtgatagaggtctcttcccgctatgcattatccgatgatgtcaattatgattatttttattttatttttgaagtcaaagatgggtttgggtacaagccaaagaaccagcaaagatgtctattctctgcatctatgttatatatagacgcacacgcatgtatttgttgaccaatattatagagagtttgtctaacctagaggatattttggtcataaacattacacacacttttttgttccttaaaaacaattctttgtattcatctctttaattttccttaacaaacgttacattacggactgcatcgaccgacccactatgtagttgtattaatggtttgtgttaacccaaaatcgattgcgtgtctcaaaagacgaaaaaaaaaacgactgtcttatacaaaattcattaattatgatccaagtcttgtgttaattacggtcaacattttaagttaaaattaattatttattatatatgtggtggatttaaataattattttcatcctgaacattaaagggttaataatttacctaaatgactcaccaaaaaattaatttacctaaatgaccatgatgaatatctaattatttaggtaaatgagcaaatgacaaacatataatcaaagaaacactttaatatatataaacatgtaaacaccaattatttaggtaaataatgtattttctatcatttgactttaatgtctttatatatatatatatatatatatatatagatacatatgtgttttgcacaatcattttattttaataaacaacgtactgtataaatcacataaataaaatagcataatatttttgctaattaaaagtcgcttatgtcatccaatacagttgagtgtgtttttaaattgttttatgtaatatataaaagttcatggttaattaggatgaatattcaaaattaaaggacaaactctgtttctattcgctacatatatagttttacggaatacactctgcacaagtcatcataaaacaactggaatggaatatgcgatgaatctctttaataataatatgtgggatctgactgtggattctaatctaatatttctattataagcaatttggacgattcgtgccattttaaaaatggttgagggatttttttatggggttgaatattgtcattgcgccttatcagaaacacaaaaacaaaaaaaatattgtcattacatgcatgatgttgatgaattatttttcaatcatataaacttgtggttgaagaaaaagcacaatatttaacaaacaaaaacataacctgaaacaatataaacttactttctaaattaataaaacatttgaccgaatggggaatctaaaagtgtgtcatataagatattgatttaaagacctagatgacgtatgggcttacataatatgtggtcaacattgaatattatagtcagagcaaacttcgcacgaacaaatcaactccaatctcacaccaatagcataagaccatgccgtagtctatatgattgccacaaaagaattattcttattggccaactttgacctagtgttatatttgtatttatatcttttaattaagtatttattgaattatgtatatacattgattgttgcattcatcttttttacttagtatgccatctattcaattagatgaacacattgtaatactataataaattacgtatgtttagttacgatagtgctttaattttgatctaaaccacatgatctagtcagaacgctttgatcgatatttgtttgtgtttattttttttgttgttgctaaattgtaaatatcagtaaggaatgaaagttggggcgtacaagaagttagacctataaatataattgctactttgccaaaaaggtataaaaacaagggaacatatacaagagaattttatgagattcaataaaagagctttagtggagccacacggttgcatcagtcttgagaagctgcgcaaatgtcgtcttgctgagattgagttacggagtaacttgtatattgttttggagtaacttgtgcttgggttcaattggtttactagtactttatgtagcaagttatagaacagttcatatctgtatatacagtttgtgagggtggcatttccacagtctctattggtattgtatgtttatgagacaattcatgttacgtatatgaattgttacaaaactttatgttgtgaccagctacaaaattagttaccaagtcaatatccatggccacgacaacacaatagcggccactatactagtgaacaaatcatcggtagctatacttcttggaaatggtaatgaatactacaaaaataaccccacaatattcttaagttttttgtgtggctacacgcctacactagcttagtcatggataaagtcgtttacatatgtgatatgtccgcctaaccaatgaggattctgatttctgaatcgggcagatttgtccggaacacgatctatgctcatgtaggtcctcatcactcttgcaatgatctttaccacaattaattcacaaattcaacttaaaatcttataagttgaaaaagctccgatcctccctctttgttcacattaaaacaaaacagaacttattgaacacatatctgcatgactgcattttaaaaagaaaactagctgtattgggctatgttgtgggcttcgctagcccatgtaggttgaatatctcttgtcatagtaatgaccatctatattgaaataaaattcttatgataacacaaaccatattaaatctgaacattgattcacgcaaatagagatagttggcaccaaaagtctaagacgcacactcatcttcataggaaacccaaaccctaagaaatggaaaattaacagcttcatagttcaaacgcagaataaaaataactacaaaggtaatattcagttttcacataaatcattttccttttttctataacaaatggatttccttttttaaacaggaaaatacctgaaaaagttaaggcaaaggtggctactaaattatttatatatctacgttcccttagctctctgaacttgagtctaagataaagaaactctcgacgacatcttgagaatcgaacgagaatgatccaaaatctgcaaaaattaccccaagacctccaatcctcggcaatgaagatgcctcctcccttttctgcgtcgaagactcaatacttgttccacgacgagtcatcggaaaactctaaaaagagtttggtctccacaactctttctttgtcgtcttgtgaaaaccctaataagaggaagatgaactctgacgaagttctcaatatttcttgcataccaagagactacaaattaacacaagtagaaagaaagattgcacgaatgaggaatctctcgtatcaagaaaaggcagaggacgaatggtacggtgtctcaacagaactaacactcttcaaggatccgtggatcatcaaaaaggtactaaccactagcgatcttggccagatatacaggagaatccctaatatttgaatcaatatagatgttctggacatattcttaaattatttcatatcgatctgattttttttttttagtcataaaatatgaaaatatttgtaaatgtaaaatttaagaaacgcttttcagaaaccatttatttactaaaaaaaatatatgactaaagaaaagagttttgatcctttggtcaggtttttcactttgcttcagtcttggatatggctcccaactcagtctcaaatactcattgcttgttggacacggagtcaccagaaaacgctgaagagagtttggtctccctggatctgtgtttctatgacaaaacatggccacatgatcccaatgttgcttacaataaaccaacgtccgaagaagcaataaacctggcgtggatgaggactatgtcgaagagagcaagaaaagaagaggagaagtactacgtctcgacagaactaactctcctcaccgtcgctgacccatggaccttgaagatggcaatgaccaaaagcagtattggcaacctataccgtcttgttctaaaggcgagctttgtagacatccacattctgagatatctccctttggatgatcaaatgatggtcaaagaagactctggattagcagtcgaggtgtatgatcacgacactgactctgtgcacaatctggctcttaagaaatgggccaaatcttcaagctttgttctcgtcagcggatggcgtaagtgctttgtcgacagaagaggtttgcaggttggcgatgtgattggaatgtattgggatcgttctgaatctaagcttcatttttgtgtgctttctcgttccgaaacaatggattcagctcctcttcctccaagtccataggacctcactagctatggaggctctgcagagagattcttattttctttatgtaatcgtcaaacaagtgattggtgttgtttctgtttttttgttgttgtctcggtgttttggtttcatgtgtttttgttttttaagtataccggtgttgttttttatggtttcatgtggtttttatatgttttaagtgttaataaagaatcctgctctcattataagtaaaagtagttgagttatttgttacaaacccacatataacaatgcaacatagtagttgtagacaaatccaccacggggcattagatattacaaaagaatatttcacattctcttagtgttttaggataaaggaaaggtcgagttcgcgaagtcattttccacataaccaaattgcattgttgtctcttgcttagcatcgtctcgagcatcaattttcaatttaaaacacaaagaggagatatatatgtggaaaaattaggcagagaatcaaagatacttttcttgaacaagaccagtactaaatcgttttaaaaaggtactcaagtttcaactattacacttgctactgcttccttcactatcaaactacgaatcttaaagataaaacatgcgactaagcacacgcatgagatcaatcccaaaaggtaaacgtcactgggaaagttaagaacaaatccagagagcctatcgactcaatttatatagacagtgtcactatgtcttgggggtctatcaggaaccgtacctggtttgaatctggacgcttcatgtctcgccagctcaggaggcaccgcactgttgctctgaacaagcatctgcttcagatcatagaagacttcggtatcatgaagtgtcaagaacgaagtcgcaacaccacttttcccagcacgtcctgtacgtccgatacgatgtgtgtacatctctatatgtttaggcatgtcgtagtttatgacatgagccacatccggaatatcaattccacgtcctacaacatctgttgcaacaagaacgttgtatctctttgctctgaatccttctaagctgatttctctctgctcttgtgatttcccaccgtgcaaggtcgtgacacggtaccctgccttatccagattcttagcaatcgagtcacaatttttctttgtgttaacaaacacaatggcagtcttctcgccgagctcatcgagcagtttctgcaatctgaagaatttctctgattctttcatcataataacatgttgcgaaatcaaatccgtagtctttccagcagtaccaatggtgacaacaaccgggttcctcaagtacttccgagctagccgctctaccccaggaggcattgtagcactaaacatatatgtagttctataaatcttcttttcatcaagctcttcttcttcgttctcaggtttcaaattacttgaaggcatcgcatctaacacacctgcaacctgtggctcgaaacccatgtcaatcatccgatctgcctcatcaagaaccacatagttacactggttcaacaccgcataacgcctctcaaggcaatcaatcagacgacccggagtagcaatcacaatctcacacccttgtgttatcttcaacccctgttcctcaatcgactgaccacccacaatagaagtcaccctaaaccctagataatgcgcaaacttaacagtttcctcctcaatctgctgagcaagctctctagtaggggccataacaacagcataaggcccctcagtctcattctcttcgctcatcggtggcaatctagagatgtaagctaacatgggtaaaacaaaagcagcagtcttaccagaaccagtctctgcaatgccgataacatcacgctgttgcagtccaagtggtatagctgccatttgaataggagaaggtttcttgtatccagctctctccacagctttcaaaagctcagaagtaagcttactctcttcccagctcctcatcggacgaggaatcctcgaacccttgtaagagatattgaaatcttctctgaaaatacgccaatccctttcagtcatctcctctaatctcttatcactccaatgcctgtcaaccctcatatcaaacgagtcataagtatcagcagcttcttctctcactctctgagcagcagcttcctctggtttctctacaataccatctttcttacgaatctcgtctcgcatctctttctcatgcttagccgcttgtttcttctgctcacgacggtccataccagcacgaaaccctctcccaaagagaagctgagcttcatgagggttttggtaaagaacgttcatatccctagaagtatcctcagtgttttcccaatcaaaagagaaacgaaacttctcgcttggcctaatgactctcttcttcggcttcttacctccaagatactgctctttaatggcgtcaagttccttctccttctctctctcaactaatttctcaacacgcgccttctccctagccttaacctcctcttccctctccttttctctatttctccgatccggttcacgatctcgttcacgacggtcacgctcacggtctctctctcgctctctatccctatccctgtctctatccctatcgcggtctcgatctcgccctctatctctctccctatctcggtcacgttctcggtctcggtcccgatctctatctcgatccttatcccgattggtatctccattggagacatcttccgtctcgggctcggggcgaccaagttgctcacgacggacacgttgctcggagatttgatcctggcggcgttttagggctaactcttcccgctgttttttggtgaggaagacaggcttcttagcaatggaggaatcgagagtattgacggaggtagatccgacgacttcgttgattgttcgcttcatcggtggttagctggagattattcgcttggtcgattagcaggaggggaaagcaaacaagacctagaacctttcttctcttcttctctcgctctgatttctttttcacttggattctctttttctacatttttccaaaaccccccaattctagcaaactctcaagggttttaggcccattagtttttcttttgcattccgaattcaaatctaattttgtttttaggcccattagtgttttttcagcggagattatgtagagtagttagattttctcttgggtgaagattacaaacccatttcaagggttagagaactcgcttgtagtagtgtggtgtgacacagttcattcatcattagggattaaaccaactacactaattctgtctttccaacatgaagttttctggtaatgcaaacgaaaccgattatcttcgacatcaatgttcagataaagttgaaaactgatataatggttgctaaggagacgacaaaatgttttttgtggaagcagagaaactaaaacctgattcgttctaattgatgctctcaaaacataaccctgcttaaatgctgatgttcctaaactcaaccctgctaaatatgctaattcatcgtataatctatacatatcacctaatcttagttaagcaattaccaaagataatgcttcaccccaaggccattgcaagtcaatatgagctccttgtactcattcaatagttcctgcaacagaagatacacagggatttatcaaactcaaaagctttggaagtagtttctctctcgaatgaaattaataactttcgtctaccgtgttgtgctcatagatacgacgcatccttttcttatcgtactcctgccttgcaattgggtcgctcaacactgttcagttacaagatcaaattctttattgctaaagtccacagaatcaatggctaaatgaaaacagattcctttcccctaaactagtaaacttctttccttcaataatacattctgcattacatagttagaagaagaccaatgaaacaaattcacattctaagcttactactacttcaaagcctagctcaacaaacaaacacaactacatctacacgatgaaagagaagcaaaaccttgataagcctcgttgatttcttgaaacctagacgtagcagaatcctcttctttaaatttgtccggatgccatttctgcaacacaactccaacacaatcatcactgaagaactcacactcagagactgtcacaaattagtgggaaaatgaagtggaaaagagaaggaaccagagcaagacggataaagctggaacgaatctcatcatcagaagcgtcacagttcaattccagaactttatagtgatcctgcaacacccaattcacaaaaaccaaaactttaacaaattcaaaaccaaacaattatcaaatttttgtttttttgtttgtttaccttgtaatcctcgaaatcgaaaaaatcgaagccatggctgtctccccaatcggaacaccacattctccagagcaaacaaacgattccaagcttcctcaaatttacgattttcctcctctcgtcactgtgggcttcttcagataaaattttattattattatgcaatttcgttttagacccctaaactattacattattacagttaaaggacatttcgcagcttccagaaacatttagagacggctgagatacacagtgatggcttcgtctctcaccactagattatcggcggtaatcggatctcgacggagttttccgatcgtcggagcgttttgcgttctgtcaactctctcaatctcttctctttcttcttcatctcccttcaaatcgggttgtgcacagtctttctctgttgttcctctcttaaggttagtattttcgaataaacgtcgattctttttgttcagttttgttaataaagctcatgaattggaaatttataggtctaagtttagcagtaaggctttttcttcgtcgatcagaatggaggagagcagcaaaactgtgcccagcattgttgtctatgtcactgttcctaacagagaagcaggtttcgtgtttgctttaattctcaatttcttgtgtttttaggaacctgggcattgtcctttgacagtagtcacatttttctggatggtgagaaaatgataacaactatggagctttggtttcctcttatcggttttgaacatgaaagattttcccttttttggatacctgtatatatatctctattagcttagacttctctttccaatgactctatgacttccttagtactagttcttctgttgccgtatccaagattttactggttgagacctttgtaggcaaatttggaacctggaggagtagcttaaggaaactccttgtgaacttgtattcattaagtttaagaaactgatcgaatcacctatttagttgtatacttgctagagtatttactgatcgagatgtcactaatggctctcttattttttatattcggatcaatttctctctcagtggtagatgatgttctgcgagttcttaatcttttatttttactatttgtttcgttggcagggaagaagttggctaacagcattgtccaggaaaagcttgcagcgtgtgtgaacattgtgcctggtactttccttttcttgtgttagcctcttacttctttgtttccagtctgaatttcagtaacttgagtaaacagattctatcgtctaattgggtttctgcggtcgagattttgtagaaccttatctgctagcgtaatcactttttggtcagaatgtttttgctattcagaaaaagaatgaagttaattcaagaaagaactggaagctaattctagcaatttcgtgatctgttcatgctttatgatattgaatatagaacttactactttgtttgctggcatgttttgttttgtgatattgaatactactagttctgtcactagaagatgtttatgtttgtttgcttggaatttggatgcaggcattgaatcggtgtacgagtgggaggggaaggtaagtacggaacaatagatgcacatcattcatcattcttcagtatattttgatctcaatcctatctcgaggactaccattgataatagttgaacaaagatctctgagcttttaggaacccctagaaaaactcataagatctcataaatattacaaatgatcattaaccctcctactttttttttttttttgaacaccgattaaccctccttctaaacataaatattttgcttggaacattgttcatcttgaaactgagctattttgctagctgatctctgaatatattgcacataatcaaaccctttggcttcaggttcagagtgattcagaggagctcctgataatcaaaacaaggcaatcccttctagaacctctaaccgagcatgtcaatgcaaatcacgaatacgagtaagcattgttctatgacgtattctgcatataaaaacatgagtaatgcgagtgtcttgccttttctttagcaatcacacaagctaagttaataaatatggtttacttgttacctttagtgtgccagaagtaattgcgttgcccatcactggtgggagcgacaagtatttagaatggttgaaaaacagtacaaggaactgagatctcgacatctcgtagctgcccatcgtcaatggctttctagtattagtttcttttacatttcagtaacctctgtattaaagataaaacgtgtgaagtgtaatactggaccagttcgtcaaatgaaataaacaatgacattgttccatataatggatggacatttgcttaaaagatttcagatcaagtctttgattcaatgagcacctcacagctcatagattttacagacatcattaacaaaaataaattgtaacatgttatgtgcttttaagctacataatcagtaactggaagctgagacagttgtgtatcctgagccttagtcttctcctcggatttaacctgtccatagaaataagagactgatccccagagggagagagccaaagcgacacctttccccgcctgaaacttctcctggaagcaaatgacggccaagatcaccgtcaccggaagcagagcactgaccataattccagagaccagagacgatgcacagaagatcaacccaatagctcccacaaaaaatgcttgccagattatggccgtgaacacaatcaccacatagtacaaagactctccaagcttaaaatctcttgcttctcctgctatcacctgccaaatgaaacattatcctatcaagaaattcaaagatcccaattcttgattagaaaaagcatactctttcttcccaaacaaaattcaaacatcttccttttagggttccataaacaatccagaggtaccctcttggtttaaaaggcttaaaaatgaaatctttatcttgcttttggatcaagaaagtcaaagatcccaattattgattctcaaaccctattcttgattagaaaaagcatactctttcttcccaaacaaaattcaaacatcttccttttagggttccataaacaatccagaggtaccctcttggtttaaaaggcttaaaaatgaaatctttatcttgcttttggatcaagaaagtcaaagatcccaattattgattctcaaaccctattcttgaaaataaacaaagcatgttttaccttgaaatcgccagcggctagcatccccacgaggcagacacaagtggcagcaaagcataagaccatctggaactcgagcgcgagcgtatacgtgattcgctgaccagatttcttgtaagaaagctcgacaagtggcaatataaacccatagagaagagctgcaccaagagtcatgatgaacccaacaacatattccttgtgtgtctcgtttgcaagcttgtcactatcagagttaagggcaaggactacggcaccaccagtgagcaaaacgatagcgtttatagtgaaaggtgtgaacttttgcttcaccataaaaaatgcaaagagagcagtgaagcctaattgcgcggagatgatcaaagacgcagtagaaacagggatataagctaacccgtaagagtagaggtaattgtcaaatcccacgagcaaaccaacaacgatagcggcgataaagagaggaggtttcatgaggaaaaatggagtcgtttcttgttcttcaaggcaacgacgacggcggaggaaagataagagaagagggaagaaaatgagtggacaaccaacggtttgaaggaagcttggaaaccagatcctttcgccaccattttggaagtagagacgcatcattagagggcctccacagtttccaatggccaagaatatacagtttatgattacaagaactgtcttcatcttcatcttcttcttcttgctataaccaaattatatgttttttagctggttcgtcttggttcgcatcaaagaaattcaggtggaattataaggtaaggttataaagaggaggccattgttttttcttttctttttcctaattctttagtttaatggaatttatattagttgaaaactatacaaccaaataaaataattaatctcctccatagctagcagcctagcactcatacctcgccctattagctgactcgtatctgcttcggaaaaaatggtatttgtaactttcgagtcggaaaaaatatattaagatattgctacatgtgagtcatgaaatggataaagttgataaattcaccacgaatataatacactaatacagtacacgatttattataagaatttgtaaaataccaaatccagaaacagataaaatggttgtctttcgtaattgtttaaagtagtgatggtgagcaaatcgctgttttctttatgtataattgcaaaaacaatagcacattagaagtgttgaaactactttcttaacatggaaaaaagtaacgactgatcattgttgagtttatctttatatgctttttatggtatttgtattggatattgaagtggacttctcatataaggatgtcgttcttttcataatgatctcttagcaaatcatcgatattgatattgtatattgaagtggactttaaaaaaatatcgttccttttacttaaaataaaatatgttattacttaaatagacactggaaagtgtcgcatacctctaaaaaaaaatcagaatttttatttatataacggaacacaaagtataaattaatcggtccttcatcggagttatgagtttccccttcatttacaattatttttttggagagattacatatctatttatcattgacatgacatcgaataacatgtatcccgaaaattcaaaggtacattccgtattgtgtgtaccccctacttcactacacctttttggactaacactaacttcaaacctaaaaacctacaatattaaacaatcttactttatttatggctttcttctagttactaaaagctctaaatttatagcataatgaccatttttctaaacctttctgtattcttttatacattatgattttagacagtttcttgatttttgtagtaatttagaagttttagatatttctcgttgataaattcaacacgaatataatacattaaacgctttattataatatataataatttgtaatctaccaaatccaaaaacgaataaaaacggttgtctttcgtaattgttctaagtagtgattgtgagcaatcgctgtttctttctgtataattgcaaaaaaaaataaaaaaaatagcacattagaagtgttcaaactatctattttcttaaattggaaaaaaagaaagagtgattgagtttatcgttatatgctttttatggtatctgattaaaaagtcaatgacaaggtcaatgataaatataatttctccaaacaaaagtcaatgaagagaaactcataagtcttaggtccgatgaaaaaaccccgattaatttgtaattttggttccgttatttgtttaagtaatcacatataattatattctattttaagtaagtcagactcaaaggaacaatttcttattttttaaaagtttatttcaatatccagtatcaaaaattcagcaaaatctttaagaattatacattttaaatatttgatttgtcgagaatattgattttgataccaaaatttttaaattgttctttaagattcgtggtaatagaagattattgatgccaaagattttgtttctattcaagtatcagatattgtgttcgtagacgttccatcgttagaagatttaactaaatatttgattttattacaatctttctcaataatcatttaacaaatatttgaaaacccgtttgataatccattgatccgcaagattatgattacattttgttggatggcattttaagataatttgttacacttctcaacgttaaaacctatgatgtaattccaaaatagtagtataggatacttattcacgtttaaatgtaaagaaattcacgtataaatgttttatgttctaggaggctttggcttttctcggttaagtacagtctatgactctatgttgtgggagtcttttgcgatctttaatttagccatttccttcattagcacctattcatgctttagccttgtagcttttagtttttggatgcacttagcctttggtagcttcttaacagcattaccggtgggatgattaacctttagccgtttctgaacacacctatttatattgttagtgttagtgtctaaacagtaatagtacgcatcattgattgtctatctaattcaataggtgttacattaaacgttgtagcctttcagctttaccggacaagatcatgtggtaccgaaccagaccgaccggtctagaagctttcgattttcatataaataacgtatttccccatgaattttacaagtttcaatgacaacaaaagtggcggcaaattctgctgcttacgaagccatagttcgagcaggtcctcgtgtaaagcaacttcaacaagttcatgctcacctcattgtcacgggttatggtcgtagccggagtctcttgacaaagctcattactttagcttgttccgctcgagccatcgcctatactcatcttctcttcctctccgttccccttcccgatgacttcctcttcaattcagttatcaaatcgacttctaagttgcgtttacctttgcattgcgttgcttattaccgtcgtatgttatcttcaaacgtctctccgagtaactacactttcacctctgttatcaagtcttgcgccgatctctctgccttgagaatcggaaaaggtgttcattgtcatgcagtggtttctgggtttggattggatacttacgttcaggctgctttggtgacgttttattcaaagtgtggcgatatggaaggtgcacgccaagtgttcgatagaatgcctgagaagtctattgtggcgtggaattcgttggtttctggatttgagcaaaatgggttggcggatgaagcaattcaggtgttttatcagatgcgagaatcagggtttgagccggattcagcgacgtttgtgagccttctctcggcttgtgcccaaactggtgcggtaagtttaggatcttgggtgcatcagtacattatcagtgagggtcttgacctgaatgttaaacttggtactgcgttgattaacttgtattctaggtgcggtgacgttggaaaagcccgggaagtctttgacaagatgaaggaaactaatgtggctgcttggacggcaatgatctctgcttatggtactcatggatatggccaacaagctgtagagctgtttaataaaatggaggatgattgcggtccaatcccaaataacgtaacatttgtagctgttttatcggcttgcgctcatgctggactcgttgaggaaggacgttcagtctacaagagaatgaccaagagctatagattgatcccaggagtggaacatcatgtttgtatggtagatatgcttgggcgggctggatttcttgacgaagcttataaattcatacatcagcttgatgctacagggaaagcaactgctccagcattgtggacagcgatgcttggagcatgcaagatgcacaggaactatgatctcggtgtagaaattgccaagcgtctcatagcccttgagccagataatcccggtcatcatgtcatgctctcaaatatctatgccttgagtggcaaaacagatgaagtatcacacataagagatggaatgatgaggaataaccttagaaaacaggttggctatagcgtaattgaagtggaaaataagacatatatgttcagtatgggtgatgagtctcatcaagagactggagaaatttatcggtatctggaaactttgataagccggtgtaaggaaatagggtatgcaccggtttctgaagaagttatgcaccaagttgaggaagaggaaaaggagttcgcacttagataccacagcgagaagcttgctgtagcattcggtttgttgaaaactgtagatgtagccattacaattgtgaagaatctacggatctgtgaggattgtcattctgctttcaagtatatttctattgtgtccaatagacagatcactgttagggataagctccggtttcaccattttcaaaatggttcttgttcatgtctggactattggtaaggacaagatacaaacacaatttttttattacaaaagatggtacatcgttcttgcacaagtaacaaccctgtgatattatacaagataagcctattttacagcggttttattctcacgcattgaattacaaaacatattctacatggggaggagactaccgacctcgcaaacccattttatacagcagttattggatgttagggagatgttttgacatcagaacattaccgaccttatgattctggtccaatctcttggacgcaatcaactccaatctctgagaatgcttcaagaagttttgggtagagtttggagagcatgatcttgaaaccggtggaatttgtggttgagttcccctgcaggttagctgatgatcctacagggacgccttccatataagccttgcacgcagccagaacatgctgggcccggtgcgtaaaatggtccttcacaagcatctcaaaatgctacaatgcaacaacacagagttgatcaaaaaggtttcttctggtgattttcattttgtgttgaattattgcatcagaaccctacctttggaggcttacggagcattgagatcatggatttgcaggttatgaggaatgcattctcattgtaactcactgagtttttctctccctcggctcggcccaactgcttatcatagccagcttcattgaagtaaggcttctcattcagaaccagagcctgaaacgaaagaagaagttgaaggatggaggagctccctgcgttccatacttcagtgccagagccactccatgtattcagcagactcaagcaaactcttcctgactcatacaggttcggattcagtcgcatcccacctgaatgataatgtaccatctgtatccatagaaggagaaaaaattatcaatgtcacttgttttagtccacaaaacacttttaaacaacaacagttacatttttagaccccatgatattgctaagaatttacaagaaacagaagtccgactgactagtccccaagaaacacatatttaaaagcgagagtgagtgatagagaagttaaagaagtgaaactcactggtggctcatgaggatattgaggtggaagcattatgtcgaaaaagaaaagcccatcgtgatatggcgttccaggggcaccaaccagggctgcacgcagaaggtccatcctttcttcacacacacgcacatatatcgtgtctgttcatcacaaaaattcaaaatcagtgattttataaccaaacacaacatcagaacatacaataattgaaaactatcatttggccaaagcgaaaaaaaaaaacgcggcatggctaggaaatcaacagagaatatatatgcagaaagagtcagaactaactcggaagatttgcctccaaattgctccattcttgctggactttcttcacccaactctttgtgacctataagagataaaaatgcaaaaggattacttggcttaagtatcggtttatcaaaaagaatgttaagtattggtcccaagagtcatacctgggactgagccaaccctttatccgaagaaaggaaatgatggtccgagcagtcattaaccatatcaaactgtctgaatctcacttggttcctgctgttctctagaagagttgaatccagtgtcttgttaattccttttccttctataggtatgttgaccatcgtggtggtcatatccacttcacctgaatttgtttcagagttgtcatatgattctgctgtttcttgaacaaggacctcagagtcactttgatcttcagaatcattgcaacgtgaatgtgaacttataaccgaagtggaaccctgataaccaaaaaggcttgatgcaaggtttgtgataaatccaatggcagcttttggaaggaaaaatgaactacattccggaatgttctcgttgcaactttcaccaacactgtagagcttcaccagaccctgatatacaggtatcatataagtcactatatatatagaagaatctgctgctatgggaataaactgatatattcctcatggcacaaaaactctaggacacccaaacatctaagagcttagcttatataaatacacatcagattaccgtttcctgatggtttgaagatgcttcatccgattgactaatcttctgacttagatcttgaacactgccttccgaacttacagtgctagagttggaatattcagacctttccattttccaaatttcacatggtgcaacctgaaaaacatatattcagaaacttaacagcatataaatctgaaagctacttcaatcgagtaattcagcatgtaaataataaatgccaactgtaaacttctttgagtgatttactggtcgcaaaacaagactaggagaaggggactgtagaagtacacattccatgcttggttcacgaaaaactaaaaagaacctaactaagttacacacatttgacatttcaaccgtaatagcaaatagcaattcacacacaatatactgttgctaaggaaatataactagcacaatacgtaccttgctagtagaaccattggcccatttcaccttcacggaaccatttttaaaacctgtaacaacaccaatacttgacaaaaaatatgcgccactgtagtcactctctgtaagtaggtgtttcgcctctgtagcgacgattgtgtctgcatttggatcaaattttccttctggaagtaacttgaccaccacatcgctgaaacagaatccaaaatcagggtgctcaagcagttcatatgcactgacaatttcttccatcacctcatcaacacaacctgttgcttctttctcaacctgtattgtccattgtaccttcacagtttgttccttagcattgacagccttcacaactccccattttttgctgttgcaggtttccttttccacaacaaactgttcgggccaaaaatcatgagcattaacagcaccaacaggaagcagctgttgggaatcaactcccagactgcagctaccatcttgccacataacagcaaccttcatctttgtctttgtgataacaaatagctcatccaaacctgagttctgcatatttctgttaaaccctttttggaatgtcttatggcattcattgagattgtaggcagccacatttggagtttgccgctctgctatatcacagtgggaagagccagggagtatacaccagtcaccaagctgccaactcgcatgagaaacacaaggtaacaaagttaaactctcaggattctgcaaagcttgaggtgcagttaaattccgatcaccctccattacgatggaggcaacccaatcgacgtagacaagtcctgcttctacagtgcaaacagttcccataacctgggttcctctccaggtcccgcataaccatgtagttgatctgggggcatgggccagctttacctgaactctttgccctgggtaatacgaatattgagaatcctcgagtaaatttgggggaatggccacaagtttatcttgaccatctacaaggacctcatagttggtcccatcatcaagggtgacagagacacgctcaactattttgtcaacccttccaacccaaggtccgttaatcacataatcagagagtgaaatagaacgcaacttttgaagcctcttggtatcaacttccttcatgatcttcccatgagtactttcgagattgacaaacatgtctatgttgataaccctgccactctgtcctgatggttcagtggcggaccgcacaatgtcaccatacataaatcccctctcgaacgacaggaactcatcgattttgccaatggtttcttcaaggtttgagaaaatgttctgtgcccgtccaccataagaaaactcgacttcttcgtgttcactgctaccactgtcgctggagctatcccaatcagagtcagtaagggacatttccatagtttagacgcctgccatggaactgaatattcgtcaagtgctcaaataccaaacagaaacaaatgatacaagaaatgctgagagccaggaagatatgaaaacttctgaccttgatgagaaacggtgtagcttccctgtttgttaaaagatccagttactttgataggagtgtggattctcacgttagatgactgatatggactgacagcaacggtcagctgaaactgcagaccgtgatgataactgctcgactaagataataggagtcaactgtaagactcagataatgccaaaggagatttgctctacgaaagataacgtgagtcaactacgaactcggataatgccaaaggagatttgctcgaacaagagatgaggtgagccaactgaggactccgaaatgccaaaggagatttgcccaacgaatggactgaagtttccagttggataaacttcaaaggggaacccaagatgtgattggagttccaattgccaaaggagatatgccctagaatgagggtggagcttcaaacctcaaagaaattcgaaagctccaagacttgtatcaaagccacctaacgggagaaacttcacttctgctgctgctgcttaattgttacttttgccaaagaagatttgccctaaaggagctagaatctgaagtataaatgggaaacaggacagagttcaaacgaagtgagaaacaagatcggtctcttgacaatcattcacgcatactcccacaagtgtgacagtgagacaatcatgatgaaatttcgttaatagctcatgcgaagtaaaccagattttcctccatcacttgagaatttccaaagaacctgcaacagcgtcatttgtttcttacttatcatagaagttgagagtcacagaagctgagaaacaaatcataaagagcaaagcataggaatttcttgctaaaaataccaatttggcaattaaactaagaagagagcacagaacaagagacaatagagggagaatctcaaaggtcttagctttatactttctaaattaaactcttgaagttggtaaaaagacagcaaaagctaggaaattggagaagacccttttcttaatttaattcaacaaaagatcaaacaaacaaattggagaaggaggaacgtaccttaagaagcggcaggctttatacaaacgaaggagaaccaaaaaacacccctttttattaatctcaatttctcgcctattcctctagagaaggagaaatagtgagaaatccagaagatgcagagtacttgttctcccttaatctcccgagtctatgacgccattaacgaacctccaaaccattgcaaaaccaacagaattccctctctgtttcgttctctccttctctctctctgtttcgttctctgctctgtttcgttgtctgctctgtttctttgctctggaggtggtggttggatggtgttgagagtggttgattaggtatcacatcgaaggaagggggaaagggcaaagacaaagatatattcggtggagaagaagagaatataccaacagtatctcagtatcccacacacacacaactctacatcactccttttcttcctcccttttttctctcttcctctttccttttccaacccacaaccaaattatacattattaactttattatataatctgttatacattttttcattatttgtcaataaaaaacaaaaatctgttatatttcaaagaaaaaaaaaagaattaatatataatctatagaacaaaacagaaaactatagtcattagttccaaaaaaaaaacgttaactctaaatgatgacacaaagcggtattataaacgatttaacgtaaatagctaaaaattgtgtaaaatagaagatgggatatagcaaaattgagaattcgtcacttgtcctttgaggataacattaagatgtacatttttctgttcaagacataagtcaacgagaatatggcaaacatatgtttccatgagctatcattattattgtttctctgtttcttattttgcttgaacaaagatcataactgattcaaatacccaatatacgttaagaatgtacatgatatacgttaaaggggatgacaaacaaaaatatacgttaattcgtttctttaacaaaaaaaaaaaaggatatacgttaattcgtttacttctaatacaactaattgtgtaagtgagctaccaaaatatttattaaattttctaaaatagttgtgccagtgccatatgcatgcattgacaatttgtgagagaaacacttgaatctactaaacaagctcaaaggtcaaagaacataagtgagtggctgatataaaattttgattgatttgtgacaagatgcgacttttctttagagttagtgctttttgatttttgcagaccaattgataaacgtgacacgtgtaaatctggacttttatatttgttagagtaatctggataacttgtgaacgtgcgttacatgttagcctgtcgtaccactctctatgcagacgtgtgcatcctcctaggttttgaaacaaaccacgtcttggtcagatactcctattatacatagtctgtaactcgacaccagacagtattgtgttaatcccgaagcaagtggttacgaagtgagacttctaagaatgcgaaaatattaattgaataaaatgggaaatgtggacgattgatgaacatgtttatcctagttgtaaagtacctttttagtataattaactattttgggagaagggccttaagaaaatgacatattcctaacttctctttacaaattgattttcttgctttttgctttttatagtgtgctatttttgtttacgcacttgaatcttatgtcctcttcctaattggtgtccttgtgctcatccgaaagagtatctgattaagataatcatacgtgtcgtggaatgagaaagtgttttctttttcaacacatattcactagaagcaataaattggttacaaggatagaattcatctcgaggcaactagatatcatatttggaacattacataaagtgataattaactctaattttcaggaagctcaaatacggttcatgaaatacagcatttataaaagctctctcgataaatcacatgtatacagaatattaaaggatcgatatagaaggagtaaccaacgtagtgctggtccaatgataaatcttttaggtaaaaatattaagttcgacatctgttgagaggaatctttttcttaaaagagatgaatttaagaagatcaataatgaaaaccttaatatatatgataacatgcgttattgcttaaattatgttatgaaaaatatcttcagaaaaacaaacacttcttgtgagttgtgaaacacatacacacaaaagaaagaaagaaataaaaaaacacttaactttattatgtacgatctgatgatgtcaatgtaattatttgctaagataaccttgtacttaaaaacatatgacgcgatctagttctggtttataaatgtgcgtgtatatataaacacataaagaactctcacggccggaattatgtatttgattgagcaaattaatacaagtgagaaacatatgttacaaactttcacgctatgatatgtcaatacgaaataattggaaaaactattgtagagatattgattggtgtgacatgtattattgaggaaaattatgtaccagttttggtacaacggttttctgagagggtaaaattagtaagaaggtaaaacttagcaatacgaaacaaaaataagtgattgtacaagttttataccattatcatttttaggagaaaataataaataatttactgaagtggaagtgattagatgatttaaaattttctttttttttcatattttatgaatattaactatagtttttaccagaaacaatagtcaatatataaacatttttgtaattctttgattaccgtctaagtctagccaaaatcgatccctcatttgaactttaacattaaatcaaataggagatttgttcttggccaactcacatatttgagtgaaatgcatatttcttaatatttccaaaattcaaggaacagtagaacataaaatgcagcaataatattcagcagcagccatgctttttgctttacattacatatatatatgagtatgtgtacatctttagatctaagtgcatagaataatatgagtgcggcagattgtgaaggaagtggagaaactatatatcatgacaacagattccaatagcacaatgatttattcaaagtggaagctttttttttagttttttcacattttaatattaccacttttttttgttttataactgtgccattttgaatggacacaaactctatttagtttatttattaactttggtggtaaagctctttactcataccacttggaccgtcaatattgctttattaccaaaaacatattttaattttttccactatatgtctatatccagttgattttttcatgattcaaatatttgttactatatggttctgcactttctctagtactatttttagacatgaaatcttcttgttattactctatattcatgaataatgaacctaattaatatggtcatgttttttgtgacttccttgaactcgactgtttggccatcgaagttcgtttcttcttcaatttctcttgatctgctctatggtatctatgcattgttaaaatgaaaaataagcctaatgtgtaacaaatgctcatgcttaattgagtttatttctacatcattggacttactttaaaatttctttatatatttcgttactaaaatatgagccttgttttgttatgttgtgtttttttccttgttcactttgactataatttcctagaatttaaattgggccttctctttctgtaaaataacttgggtcttaggcaatgcatactttaaacttctgttggctacttaaaaatatgattttgacagtgatatcatgttatgttgtcattacggagtcttcccaattttaagtcttgcactagaaactggcaaagttaataccactttggtactttataatatatgaataaatcatttgagagaagaagaagaagaatcacctgaaccaagaaaaaaaaaaggatctaggaggagaagtgaatgatgatttgaattcgaacgaaagtgtggagttaaagacgaggttaattagattctagaattagttgctcaagaacttcggaaatcaaggattagatattttccaggaataatagtactagaaacggttcctcgatcttttagcaggatagtagtactatctcaaattggaacaagataatcaattatgataaggaaaattagttatcatgaaactccaagtctaagttacgcgcggaataatatattatttggttttgaatgttctaaaatatgcatgagataagcggtatgacggcagacaaaataaaaaaaaaaaaaatagtaagaacaatatatttgaaatcatatcaagagaagcttaagtaagtgagatagtgatcatacatacaaatccagagaaggatacatcaaaaatgatcttctctttttttagtaaaaacattattcagaaacggacacacaacagaaagaaattgaccccaaaaagattaatcaaatagagatttgtattctctctttgaagacgctttctcatcactcctttgtctctccgtccttgtgtttccccttctttggctcaacgaaacagaagcatgaacaacaaggcagctgaaacaaaaacttcatcgtgatttggaattggctcaacagtactacttcgatatatatgccttttatatttaatattatgcctttgttcttccagtttcagaatgatttttgggtttcctttattcgtttcagatttttggatgctttgccaaccaagttgattctcccttgaaaagaagatgcctcattctagctaccacttatttggggcagaatcataattttgtaaattgaaaatgattttgcacatcaggatgcctttttcagagggctagatttatatatttatgtactatatttatttaataaattatcatagtaatcttgttttcattaggttagagtttccagggtttcatgctttcatgtgttttgtgaaaatttcttcattattaattttatacaaacctttacaaaaatgaactaaacgcttttaaaatgataaaacaccaaatgctctacaagtaatacttaaatggatttggcaatcaatgatcgcgagtagcattttatattctaatactcgaaaaaaagaaatcaagaaccattgattatgtcaagcaaacaacaaggttttcttgtgtatattcgataacgtaggccttacgctatcgtacaagaagttaattagagctaatatactaaagtctccgaaagagtactttgttgtatatacaaacaaacaattgaaaatgtatacatgtttttagacgagagatttaattatatctaattaatttttaagaattttcatttataaaaagtgtaaaaacctgaaataaatcgttggaaacaaaaaagagagaacaatggctctgcttgaatacctatttaatttggaggtgatagtacgaacttaaatgtgtaaaaaagagacagatgcatgaaacaactctcctcaattagccctagggctaacaagctaattcgaacatgttaattaattgaatctctccgtacaaaattggacacccgatcaaagaggagtgccacatataaaattaacagatttaaactaacaaatgaacgacgtgaatcaacaaaaaaaaaatatcctaaaaaaagggccaacacttaaaaaaacaaaattaacaaccacaaaaataaaacaaaaacttacactctgtattgcccttttttatccccaacaaaagcatcccacatttgttcttctgcaatatcacttctatttctccctcctttcacaaggaagggcgtagaagaatccaccataatagttctataaccagataataaaaacatttaaatttcatcagcaaaacaaaacaaagaaaaccaaatgggtatcaagatcttgttgatccttggcctcttgaccctggctgtagtcgccgagtcagccaatgccacatggacccttaccaaatcttgtgtcaatggccaaggttgcattggagaggatggtgagcttgactacttgatggattctgagaccaaccggcgccaactagccgcgaggcgcagctacatcagttacggtgctctcaggaagaacaatgtgccgtgcagccgacgtggccggtcttactacgattgcaagaagaggaaaagggctaacccttacagacgtggctgcagcgtcatcacgcattgctacaggcaaacttcttaatttcgggaagcatttatacaaacaatatgattgaagaagcgagagggcaaataatgcaaaaataaaaacaaaaattgaatacaaacaatatatttataccaacgtatggttcttgatattgccctcttttgttcctcttaactatctttaatcatctttttcattttatatataatcatgatgcatatacgctcatttcatctgttgttcttcttttatatttgtgcagaaattgttgtatttcgtttgtgtctataattaagtgttgtttaatttccattaccttgtgctatgtgttaaatattaagctttgtatacagaaccttaaaaagaaattggaattgttgacgacgtttgcattgtctcttaacatatgttagaattgtatcaatttatacgactccttgttttataatgtcatcaagtgattgcaactcaagtggtatcctgctttgataaatttactcaaacaaaattcgagagaaaccaaaatttgtaagaataatatgcatcaggtttaccatatggaataattcggttcttgttgcgtatgctttgcccagactctccgaagattgattgagttcatgagatgtcaccattgaaaagtatcttccaaagttctacaatgcgcaaataaagagaaaattagggcataggccatagggtatgagttttcaaaaagtttgagaagatgttaaacgtcacaaaataaccaatctactaaatactaatatagagaaagtgagccaaaactgtcactaacatttagaatgatggctttgattggtattctaagatgatggtacaaagtgtaatacttttttttttatctgctgttacaagataaaaatgatggtatacactgcgggaccggtccaaagtggtcagcttctaaagcagaattttgttttttggcccattaacacagatacaaaataaataaataaaaaaacacaaaacccattgtttggcctacaaaagtttaagttatcccgttatgcactgcatgtatttcttgaattttcttccataaatgatggccctaaaaatggtgatatgggtattatatgtaccattcaaatctggtgacaattaatacatatcataacttaaatgagattttcactgattcataacaaactatctaaagatgacttaccataaaagaatgtatggatcagactatgggacgtagtgtttaccccgtaaatcatttatatgaaagttgattaattctcttcataagagtgaaacatcatcagtcaaaagaccgatacgtgtcattaaacataattaactaaactctttatctttcattccaaaagttaatgatacatttattattgtactattttactatatgttattagttttatcatgctatgtttgaggttttttcgttaatttttttgtagttttaacttaaaatatgaatagaatgatagtatatctagctaatagtttgaatatgttattttctttaatttttatcaatacaaaatacatttagagagtaatgagtacataagaggaactacatcatcaagttatatataaaattagtttaggataaaaatgatttcaagagtgtatgagtgatacattgttgggaaagttgctagaaaatttgtttcgatacttggtgatacgttagtttcaattacatgaatgaatgattagaaaactaaaaatttacatttatcaaaatatgacactaaataaaataaaatacattttgaaaaaagcgtgggtaatctttgtttgttttttgaatatctgaaaatttcaatcccaaaagccttttctagaggcgggactcacaccaaattaaattcatctcattaaaagaataaatcatttccaacggacgttgaatttatcggctgagagatttaccattaggccaacaccggattgggataatcacctagtagaaatgaatatgcaaaaaaaaaaaaaattggtaatccttccaaattaatttgcaaatgaaaatttagaaccatgtttagttctctatagaacaaactgttctacaaatgtttagattgcaataaatccatcaagatcttattaacaaatgaggagaaagaaacagtataatattagttagcgagtgtattcgcaaaagtccaagtttttgtaagaatataattgtcatcaatcaattgttgtcacaccaagcataacagaaacttacaacataacataaaacaaaagcaaaactagggttgatcaatgatcatgaggtgaaggcgccggcgagtgaatcggagtcatcggaaagagagagagaagtcgaggctccgtatccctcggagttgtcgacggtgacgggcgcaaataaaaccctttctccttgatcgatctttcttggtcatcatcgaagctcggtttcgaatcactagggctctgactaaaagaccccggtcgataaaacggatcagacatgagaggagtgtcagggctgagatcgagagccggaaaattcaagatggtgggagtgagaatctcgggtggcccggaatgggtcgggttgatgttgagataatgcttcatcgagttgcgacgttcggagagtcggaaggacgaagattgtttcttgttggtcacggctttgatcggagggattgagtgaaaaggaggaaatctcgggtcgggttggtgggtcgggttcttggggattccggtgagcagttggacgacttgcttgaaggaagaaggatcggttcggatgaaagtggtttcatacatgtcgtctttaacgtatctggtcggtgtagtggtgcagctgcttggtgaaggaagcaagttctttgctttatctctgtatcttggtgatttctccattgattgagaagagaagttcaatggatgtatatttatgttttacaagcaatataatctcttgttatataagatcagaaaaaaaaaatttagttcaacattatatgaacgtgtttatggtaagaaagttaattaatttttttggcataaaatagtataactcttttatttagattttgcatatatttaattttattatttggaaagaaatttgttcttttggattggcttggtgagaaatgtacaagtggtacatacatattgaccttcccattagggtaaatatgactagctatttgtagaattgtaatctcatgtcacgcgccactgtcagagttaggaactgccaacgtttgttggtgtgtggacctgttgacttgtgattttcatagtaatgagattattagtcaacatatttttagtcaacgcatttaccttctcaaaattttcaaaagagtatctaaccatagatatgggattatattagtcaatacattattagtcaacacattgatttcacaaaatcttgtttttgaccacaaaatctttgtgaagataatactgcagatacattcaaaaacttcccataattcaaaatatgataaatgtgcgttattagttattacacaaaaattcaaatatgagtcatctgtgttggatttaggcatttagcttattaaaaacttttctttccaaactcattgtgttttgtgtatcgttcacggagtaattatgaagaaactagagaagttttgaagcactaaacaaagctaaacatcaaaatatttctttttcttttaatgatagaaggtacccaagctaatctctaaccataaaagaagatgtttattgatatcaaaatcaatcattattaaccatagaacgacaagacgataatgaccaccattacatggttgaaacatcaaatttttaacagctagacatttcataatgcaagatgttccatcaagcacaagatcataccactcgacctttccccatatttctcctccttcgcgcctttcgagggcaatctctgcacaccaaatttctgttgtctcgctcattttctctattttatgcaaaaacacaactaattttctaccataacttgttgtgaatgatcgtggaccgtccaaacgtagttttaattccacaccgttcaccacttcccaaatcctctctttcgggtcatacgctcttatacaattcatgtgattatcatagtagtacaatacatcgtctataacacatgaactagctagaccatttttcagagtgcaactaaaaatataaatatgtaggaacaagttaatccaatgagatcttattatggaatgaagtcttgggtaagtaatttgttattgggtgattttgaacgattgtaaagtgttattaagttataccaacccatctatttaccatgtttttgccaaaagatatatgtgttgtcaaaaatatatagattatgtaagtttaacaaagtcaataaactttatatattttgccaagttgcctaattaattttgattcatctttcaattgaagatatataatgatgataaatgataggagatctactaaattttaactgatcttacagaaagttttttcctaaaatcaattatacaataatgacaaacttacgtacaaagatgactgttcgtactcgtaggtcgaaatcatagataacatttttatatatggcatcagaggtttcgtacaaaatgaacaaatgtacagtataattatgaaagaaaattattgtactagttgctcaacacttgtcaatacttgttctgatatgatggtgttggagataaatttggtcatttcgattcctaatgaattaatatataggctaatatatcaacggttgtgttcattaacatccacataacatattcagagtctcttttatttagcaaactatttttttcttttttcttttggggtcacgaagataaggaattaacaagaaaaacctaatatgtaaacgtcaccactttttatttaagaagcaaattagaaagattaacactaccagaaaagcccatacaaagaaaccaagctgatacatattcaacacaatcattgattaataaaagtttaagtagctcttataacaccatctcatttggggcaggtaggttcgaatgcgaatggaccaacgttgtacacactgtacttgaaccatctcatgatggtcgaggaaaatcctggtttcaagaccggctttagaacggagcccttgcctccatcgtggagtgacgacactttgctgcacttggtgtctggagacttcacgaggaaagctcgacaacctttgatatcgtagttggtcaccgtcttaggggccaggagcatgaagtatccgttcttgtccgtctttgtctccgatattgagttcttcttgttcttgcacacaagtctcaccaccgcatctgtatccccagataacacaaacgaaataaaaagtgaaaatatagtacttggatagatttgttatacagaaattgttttaaaataatgcaagagcatgtatttgtttagattagttatggtaaatttaccctctttttttaagaaggggcatgacttgaacaagattttcttactagttgagctaaatttggtattataggaaacttggggaaaacaatgacaaggcttcgctacagtagattgtcttaaccaaaaacctattgattataattaaattaaattcaaaagcattgaaagaagttacttagttttccatggtatattttatgtttatcaattcgtgaagggaccagaatgatacgaccggctctgaactaatctcgcttggtagcatatagttaaaagtttacacaaaaagttttgaacaaccgacaatgagattatgatacatataacatatgcctaaaataaatgtaaaggatgaagtatgcatgcagcatacctttagcaaaaaaaaagtatgaatgcatgggattgaagtgtggacttttcacatacggacataccacggtccacaggtgcgtatattaagggttcgagtgatttttaggataatatatagactttcatatcatgaatgtatataagtgagtacctttaacgggtttagcgccttggacgttgttgacgcccgcgtacttgcaagctttgcagtagaccacacctctaactgccactagggtcttgttgtacttaggagggtaaactggtgggagaacaggaggtttgatcggtgggagagttggtaacttaatcggagctttggctggtgggagagttggtagcttgatcggagctttggctggtgggtaggctggtagtttgatgggagctttggccggtggaagagttggtagtttgattggaggtaggggaaggtgttggggaaggctatggaagggatctgatgaaccaggttgattcactcctaaggtgaaaacagaggaagtgaagcacaaaagtgcaaagagagttagagaaacactcttaccaatgattcccatctttgttcttttgtttttctttgtgtgtgtgactttgggttgatgtgacttgggtgtatttataggagatatcgggctacaattttttatacttcatatagatactagagagtagaggcatacacagcacatgtacacaactggcgagaagtttccgatcgatgtagtcccgttaaagatttagatttagatctcctaacaggtttgaatacttgaagcaagaaactcgatattgatttgtagtacagtcacttcccgggtttttttaatagaataaatgaaaacttcgtcaacctacctgaagtttattttttctgatgaaaagataataattaacgaatgcatcacagctgaattcaatacagtgtttagtcatatatatgttaatattcaacaaattaatgttatgatttgaaagttttatgagaaaattatagtcatgtatatgtgaatttcttatagtttgtgaatttaatgagagttagtaaaaaaaaatatagatataattttacaaattctattggacaatatgtaaatttacagtgtaactttcaatgcaaatatctgggatatagatagtattagtgcatgagttttcattcatgttccatgttttgtggtccttaacatgggcatggcaacaagatgcgcctggtgcggcttcaacacattacaacacatttaaaagttcaattaatatccacacttctgtttctatttatttgggtttccaatttgattaaattagcaaaacggtgcctataaaattattcttagatcaggataagataaaatacgttaaaaagtcaactagattttaatgaaactggtaaaacaatgcccgtgtaattattcttaaatcaggaaaataactattaaaaattgatgttaattaatagtggaaactcttttggtctagtgttttacaaaaaagatttatactttcatcgtttcacgtcatgcataagatttcatttcctaaactatacaatgccttggagattataagtgcaattcttttggaggttctgaataaagctatgtgagatcaaatactttttgaaaaattccaagcttcgcaaacgtatggtatagcgtcacatgtaatatttagagtgttgaaccacagaactttgataaaacgttaaatggtacggtgatatgtatttagtttttaggattggtattaacctaaaccaaaaaaataaaaataaagcgtgaagatatacataaacgtaaacacaatggccttaagctttgagagaagaggtaagacagatatacgctagagtaaaccataaactaggcctaggggtgaaagtttctaactttctatacttcaatgatcaatctcaagataacaatgagatcgacatgcaataatttgagttaatttgggtttgagttgaaggaagttttcatacgcatttttaagccatgaggcccaatgatgttttgacaaaaaaatagaggcccatgatgtatcaagtctcatatttcatttgggttaaaaattgatgtaaatagaagtaacagtgacttttgttacccacaatttgaagaattatatgcatagaataattttttatttttataatagtaattatgttagccataacttaaagaagaaaaaaaaatcaaaaaagaaaacgaaaatagtgagagtacgtgatcagctacgacggcatccacaatacgtaagtgggctatatattattgtgaagtgtgaagtcttctaacaaacaaacagaatttcaaaattcaaattcaaatccaaatcacacgagcgagagagagcagataatcgccactcgccagagctattgatttcgcttcatcgaatctcacactctctaagtttcgtctgcaatgtcgtctaccagaagaggcactaagagaactcggccagagccgccgcaatcgctcaagaagccaacaccgaaagcaaaactcccggacgaattggatgtcgatgtttctaggtccgttctcgtgttttcttttgcttcgtcttcttctttttcttcgtttcttctgtttttttgctgaaatgtgactcgcgattgtgtttccgtgttgatcgtgtagcgatttcaaaggaatcatgtcggcgttgcagcaattcagagagaaagcgcacgaagatggccgtaagaagaaggaagaaagcatttccaggtcatatatctctccgttacatgtttctctctgattaggttatgtaaacttcgatttcatcattcactatgcagttatcgagatattcatgtcgatcgctcatgtgcatttgttgatggagcgtttcttctaattgttatcgttggtacatgaattagatctggatcttgtatcgcaaatcaatttatcaagtagatatagctagatgaagctaaggtgtttgatcatttgttctagcatttgatattggttgatctgttgtgaaattggttatggtatgctcatgtatcgcttaaactagaaagcatatatatgttcgattgatagatatcaagctcttttatatgtggattagtctggatcttgtatcgcaaaccaaatatcaactagttttagctagataaagtgttcgatcatttgttctagcctttttgatattggttgatctgttgtgaaagtggttgtggtatgctcttgaatttcataatctataaagcaaatgtttgattgatagatatgaagctcgtttagtttcatagatacagaatgatcagtcttttgttcatcagctctgaagcactcagctatctattgtgcaactggttttggtattgctctttgtctcccttaaactagaaagcaaatggttgattgatagatatgaagctcgtttgatttcttagatacagaacgtttagatgttcagacttttgattttgatactcaactctgaagcaatcggttgatttgtatcactacttggtatctagtagcatggttttgtcatttattgttccagaaagatagaatcatctgaggattgtgagtatcctgcttttgaagtgtcgtttgttttatatttgaatctttctttaatccttgtgtatctttctggcagtgtgtccactgaggtgaagtcaaagattgacgagctgaagtcaaaacttgagaaagaaaggtaggctatgttgttgaggatagatgtctgatattcaattacatgctttgtgaatgttggtttgcaagattctgatgaattgtgtccttgacttacaaaatgcagacaaaacttttccaaagcactttcaaagagttcaaaggaggtctgaacaaacatcctaagacgatgttcaacttaatttagcctttagaaatgtacaaggatctgacctgatccatttttgcagtgtgagaatattttgaaggatgaagctgccaagtttgaggagcttcataagaaattcgtgaaagacaaagctgatcatctacaaggcttgaaaggtattctggttttgtcatctcttactgttgggcgtcaaaagtgtagatttctttcattagctaattgggatgttaccaaaagtattgaacatgtgtttctgctttacagacactatttcaaagtttgaggaggacaaggagaggctctacatgcgatatgagcagctaagtaagcaaaccaaccccttataatgacaccactgttatgagaagatggcaaaacttactcacttccacctgtaaataacatatagggaagaaggagaagacaatgataacggaacaggagaagttctgcactgaaaagcttgctcaattggaagagtcactgaagaaaaagaaacgggtaaattaaagcctgtttgatcttgttatacatactctctctttaatcttgttatatgactgaactatgaattctctgggtgtagggtgacaaaactttcagcatactgaggaaaactctcggctcttttctggaaaacgaggcttctgatgaggaattcccacctgatgagtgaaagattaacgtctttttcacttgacgctagaaaggtaaaaagcccttttactttgatcagccaccccagacatttctttcaagttttctttcccagcagaaaacacacttatctcaagtagtgtttcaagactttgaatactatgaatatgaaccttattttcttctatgttatagtttgaaatgaaagattaattacattttagctggcttcaccacaagttagctaacaattatattcaccacaactctgattcataaagagcttcaattattgattatggatatatagttgtagttaaagcttatcaaccgctcctccagcaatcacacttgtacatggtgaagctggtctaagcatcaccttggctgctccataatcaccctcttatctataaaacaaaaccaaacaaacccatctaattcataactaaaacattcaggaacataaaccctcccaaattgctcccgaagttttagctccaaagcctatcaaccaactgattcttctaaacatttgtgaacaatgcaaacatcagtttcataagaccatataaaccaattgaatgttgaactattcataagagttcaatttggataaactaatttattgttttttgattaaatatgaaaccgacccttaatctatagctaacataaacttcattttcctaggaccaaagacggaatacgaaacgcaaaagtcaagtgtagtttggttaccatctccgaaatctaaaacctaaaccgaaacccaaaattcaactagaaggaaatgtgaatctcacaagaactggatttggaacttagatgaacgtatgggcagagcaagaaggtgattaatgagttgctgtttcttgttatcatcatcagcatcaatttcgactttcatcacttgaagaaaccgcatttcccgcaaaaagcacgtcacttgtctgagctctctatcacgtcctctatacccatatatctccaacaccttcacttcatttcgatcaatgaagactccctgattacttacacagtgcaagcccatcacaaagagatcaccattcatacagagttaggattgtacgtaatacttgacgcggaagcatgtggattagttaactgcgtatatattaagtttggatttagacaccttgagcacaaaagtttctagctttgtagtgaaacgtgagtctcttgagggttttgtgggatatagagtatactttgctttctatacgttgtcatctaagtgttggataattaactgaccatgaaagtgttgtaaggataattcctcaagtattggacaacaacaaagcattttatggcacaagtcttcgcatgtataccaagttgaatggagaaggagactcttttgcactgaaagaaacacttgtggtaattatgatattcgatctggaccatgatcttaattttcgaatttgtcaaagactgtaagtactaaattgggcttgatgggctcttcattggactaacataaatgtctcggacaagtgtatgtgttcttccttgtacattttcacctgcaaccttatcagccatagctatagcattctgaaatagaatcggtcaatgtgaacttttatgggagaagaaaggatttactatttcaaaataaacatattttctcatgaattacatcattacaagaaatctcaacaaaagaggatgaaaatgttaaagcgaagatgagttttcacttccagagttcttccatggggattccacgctcttgtgcaacatcgcggaactgtctcatctgttgtactgctgcaagagtggctctcgcattgttgagagcattgttgcttccaagctgtttccccaatgcattctcgactcctgccatctctagcacaatcctaaccgctcctccagcaatcacaccagtacctggtgaagcaggtctaagcatcaccttggctgctccataatcaccctctgatctataatacaaaaaccaaacaaaaccctcttaaaacataacttaaacccatctccaattgttccaaaacatagctcagtggcctattaaccaaccgattcttctaattgattgtgcacaacacaaagatcaatctcataaaaccagcattctgagtaacaacttccataaatcaatccttaaaccaagcaaatcatcacatccaacacaatgctaaaaagactaaaccccacaatcttagctcattgtctactgattaacaaaaaccgattcttctaatcattagggcattattcaatattttaacttttgtgcacaatgcaaacatcagtttcgtaaaacaagtaccataacaccaatctgtaaaccaaacaaacccatcacaaatccaacacatgactgcacaatactaatcccaaaatcttagttcatcaccaagtaagacttttaccatccaaaaccaattcttccaacaattaacacacattacaaacatcaagtccaaaactttgattacctgtgagggaaagtagaatacttagtcataggaacttgaacaatgtttctcctagcatcaatagcagatttctgaacagcagcaacaacttctttagccttagcacaaccaacaccaacattcccttgtttatcaccaacaacaacgatagctctaaacttcaattgcttccctcctttaacaaccttagtcactctcctaacttgcacaactctctcttcaaacccatctctaatcttatctttctttggcttcccaccaatacctgaactcttcttatgctttgagtccatcacataaatatctttcccaagcatactctcaccactatacgcaggtccatagagctcttcaaaagcggtagcgatctcttcctctgtctcgtcgcttccttcgtcgaaatacggaggagagacgaatccttcgggagcaattggtgggtcgaagacgacatttgcggttatttctggtgtttcgtcttcgaagaagatggtttcggtatcggtcgatgaggctttgacgagagtgagagatgagaagcggcggttgaggaaggaggagaaagagacgatggattttgtggaggaagaggagatgagagaagaggttcgggtgtggagtgagagtgaagagagtgatgagagagctgatgctgtcgccattgaaatggaggagcttttttggatgaggaaggaagtgagaatgaagcaaaaggcttatccagcaccagatcgtaaaaactgtaaagataattgtgttggggcttttaaagtaattatcaagtttctttacaaattggccacaatatattttataataacatttgaaccctcatatccttttgtttgaatttgggctcttcgctcactcctccctctttgtggcccaatgaagtttcttcaagcccatacaaaagtaactagtagtaatccacatcaaaccctataggcttgcggatacatcttaggtttactaaatcttaaaatagaaaagatcagtgaccatatgctaattcaacattttatttttacatactttggtcatttttaatatggactttgttttaattaagatcgattatactaactacaatcgcatatgacaccaacgagcaacgttaattgcttttatgattttaaaagtatgtgatttgcaaactaattaaaaggtgaccatatataaaagagtgtactacaaaaagggcctactactattcaattaacgttgctcgttagtgtcacgtggggaagttaaggttcccacttcccccaccacttctctcagttctcttcttctttttattgtcccattccaaattttaaccaacacatcaagcaaacttcattaatttatgttcagtgttgtagttgcaaacgttatttattattttacgtttacaagtttagaactagttcgaatcgtgataatcttgaataaatcataactttgttcatctaatcataagaacatagaactttgacatggtgtctccggatcttgttgacttagttctatcttaaagttaagctacacatattatagggaccccatattatagtacccaaacaaacaattagagagtttgtatgcaaatccataatatttaccgtagaattgtatgggtttaatgaggaaagaaaaagaaaagaaaaagaaaagaagagaaggacactgaaggagaatgtgatgctgctgaataaaagatacaatcaaaaaattgacaggcagtacaataatgataagtagtgtcatgacagctgacgactctactgcccaatcttgacgttatttatttttgtccattttttcttaagatattatttcaacttaaaagaagtagaaaataaaccataagtgcataacaatattccttttataaattgggttcaagatattgattcgattctgtttatttcaagtgtcgtggaactcaattttatgttatgcctgcctcggcaacaaagattttcgttcaagtggctctatgaaaataagttagggcaaactagatcgattgatgtaaacacaaatagagctaaatagtggagatagtaaactggtgattttgtttcgtaaatagtcaaaaggagggggtgacaaaaaatagatttgtcccttacctctaagagatatagagcaaaacgtttgcatagcgctgtaccatttccttctatattttatatatgtggatgtgcatggatctagctgatgacataacacggcaaaatcatttaacatttgattagcattggcatcaatatttgacgacgctcctcattatttatatatgtggatgtgctgatgtgcatgaatctagctgatgacataacctagtatatgtgcatggttttatggtgtgaacaagttttttttttttcttttcttggttttaggtgtgaactttaagttagagatgatcttcaaatctcacgaaccacaaacctccttgcacgttaagaatagcctctctttttttcttttgttgcttctagtctcagagtgtcttcgagatatgtgtagtctttagtgtaccctgagacctgagtacaagatcgaaaagaaaatatctcgaataacagagttgtgtttgctgtttttaccatttaattatgctaatatctttgttttacataataccaattgaaaaatgaatacataattcaagtttggaccattcttgtatatccacttttggcttcgtggccccgatagctaatttgattgaccttatcatctacaccaaacaagaaattaaattgtcaaattaatttagtggtggccctatactataaaatcgtaaacacttctttttgaaactaaatataaaccttacgacacatttatgtgcaaattagtggacatattcctcagtaataacgtttttacaaacctacagttggataaattattgagtcactccatgattaaaccaacaacataagagaaaaataaaatagtacactacgaatgatcttttaaatatgttattcttttttgatacagaaactttaactaccaaaaaaaaaaagcgaatgattcataaaaacgcaatgtggtatgtttggtctgttttttagttcgaatctcaacttcttgttaccacaaaaataaaacattacacaatgtaaatttactgttcagtcttgcttttccaatcactacattagcacatattcttcacatgtattttccactaatctcgcgacaaaatgttcacagtgtttctcagtttctctctctcaatattttcttgtcaaacaacatgcatatttgaacccgcatggtgaaatagcatcggcattaacatgatcaaccacaaaataaaccggggtggtgtcatagcatcgacattaacttaaaactacaaaatagagctgggtcctcgtcaggttttaaggatacatatgtatgcatgtatgcatatacaaaataatagagcactaaagcttgttcgtactcttttttacacaacatgctaataatttttataccttaggagtgaaattttagtggtccaacaacttaagcacctaagatccttccccacttttgtttggggctcctttatatctcttccaatggttacttttacttcctcttcttctcttcttgttccatctttcatgtgagagagagagttgaattttgcagatgagtatgagaagaagcaaagcggaagggaagaggagcttacgagaactgagtgaggaagaggaagaagaagaagaaactgaagatgaagatacttttgaagaagaagaggctttggagaagaagcagaaaggtaaagctacaagtagtagtggagtttgtcaggtcgagagttgtaccgcggatatgagcaaagccaaacagtaccacaaacgacacaaagtctgccagtttcatgccaaagctcctcatgttcggatctctggtcttcaccaacgtttctgccaacaatgcagcaggtaaatttttgtcatcttttttcaaaactcctgcaacaataaccataaacaagaacaagaaatatgagaccttttaccttttgtttttaaggtttcacgcgctcagtgagtttgatgaagccaagcggagttgcaggagacgcttagctggacacaacgagagaaggcggaaaagcacaactgactaaagacggtgaaacgtgtgagatcccggtttgaaggttaatgaaacaggctttgcttactctcttctgtcagtctcttttagctccttgtaatcctctgtgtctctgtctgtttctccatattacctgtaatcaaagctatctgctaaacctacgacatggttaaataaatgcattgagacttagtaaatgcttgaagaaattatgtgtaataactctttaaacttgtcaaatgttatttcaagccaagatcttaaactacaccagggatctgtatttgttttgcaatcaacaaatgaggagacagctaaatagctatcaaaaataataatctgggagacacttttgattcgtgatatatgtagttctgttacatgaaagctcatcaaaatctgaagcaaatgcaagctccttgtggtttaaagatctgtaaatcgaaccaaataaattagattggaagactaatcctagtcacgtttgattcccaacattttcattgagaactcccaagcaacaattgctgctgcattagcagggaatgctctcacaatggttggacccaaacctgcatagcatcccttgagtcctgccctcttgtgaatctgcagagatgatttaaagtcaaaaacaatatttcatatactcttttgtatcggtaattagattcatagagggaagatggctgactgaccgagctcaacactttaaaaggatttctctctgtagctttctctgaagaggtctggattatggtttttgctacatcaaaaggcaaaacagctgaccagcactgcatcatagaagcagaagtaatattcatataaaatagcaacattttttatgatggaatttatgaaacacactatatagattcctacagctatgcctccaagaccaccagtgagaactcctatccccatgtcaaccaagtaaccatctttcagcttagaatcctccaatctcgagtggatatgataccgtaagtactcatagacagtaaaaaagacagcatttcccgtacattctcttaataaggttgccgaaccaccacgaaagatacctgttacctgaaagatatccccatcaacctgatattcgattcttaagtagaatattttagcaacgagagtttctcaccccatcatttttaacggtctgaacggcacaatcaagaggactgttgtatctacggaagttaggaaccagagaatccgttccttggatctgcattctacactgaacaaaacagtgaatgtcccaaaactccatggaaaccatcaaaggtgataattgcggggaaagaaatggtgttctggagatttcacctttactagctctgttggacataacacaaaactaatgatagctccaccaaacatagcagacggaacaattatctctggtcgtggcccatcatctggcaaagttccctttacaataaaacaagaaagaagcgaaatttgaaatctggaggaaaatacagtgaaagatcatttggtctgcaatgttacccgcaagaacagcttagcctgggagtatatgccaaacatcaatgaactttcaaaagccattcccataaacgacgatgttgctcccctataaagtcctttgacctaaatatgaattcaagtcagcaaaaaaaaaacccttgtatctggccaaacaggtgatgatggatctagtaagattccattgacactgaaaaatccagactttcaataactaaaactgtttgcaggatgctaaagtcttgaaaacataacaaaaagagtgcagtgaaaatatactccttcagtttgcaagatcctcgaagcacaatgcagcccatttttgtatctgagcccttgcacatctgtattatgtttctgaagtttcacctgacacaagaaacaaaagccaaaaccccaaagttagaatcattacttccaaacatgagtgatgccaatccagtgataaactatctaaaaatggttagcctaaaacaagaaatgatttttatgcatagaaagctcctaagcaaaaagaaaccatttaagtcccaaacagcatcagaagaaacctcattgagatatatgatggatggttttatatcttctttgcttaacgatagttttaggcatagaggtaaacaatcaacacataactgataagtgaatatatatcaatggtccagtgtagaacactttctcacaccaatgcatccttaattaaaaactaaagtatagaattgaagtactgaaacataatttctcaaattggaagatgaaacacatatatacccatttggtgtaaactctgataaacacatattttacaagaaaaatcgaaaactaggattgaaaattgagtaccttgacggtgtcgaaagggtggccgacggcgacagtggcgagaccagccatcattccggcgacatattccttgtaaaacccgaagccctctcctgtcgtcgtcttactctctcccattcccacaacgccaccgagcagaagaagaattattcacttcactacggtgtcttttgctttctacaaaaaaaaatgaataattcagagtgaaagttaaatatttatatgggtgttacaaaattttacttttttttagataaagaattggttgctacatatatatgatagattctatattgtgtagtgtgaactaattagaatgatagtttcggtctaatcgtgacaaaattatgatagtttaggtagattgtttcataaaatttgtttacaattgattaacgaatggcatgtgaaatggtcaatgcttttttgtggtatatgtgttaatattatcatctcgttttaaggttttgaatagaagatggcagtgaatccaaagtgacttataaaggagctaatctcattgcacaaagtataactaatgacttttacggctccatttgtatgtagctcttggttgcaaggtgtgtaacgtgtgtttaatggtgaaagatctctttcttctctatgaacttgtgtgtttttgtgtaggtggagacacttcttttgtatattccccttgtattgaaaatgtgctttgaataggttgatcccgcaggactcaggtttgggttggttctttttgtgtaaccttgtattctatcttcttctttaatcaaatcagatgacaaaaaattaaatatatattacatttgtatccagacatgtataaactttaattaaatcactatcataatggtttgttgacacaaagaattcacctaaccatggttatgtttttgttatttaatgagatgagatcaaccatggtgattaaaataggttgatccctgagctttggattggttctttttgtgtaactttgtataattatatcaaatcagacaaaaaaatatatataaaaaattacaactgtatccaaagacatgtataaactttaattaaatcactatcataatggtttgttgacacaaagaatgcatttaaccattgttatgtttttgttatttaatgagatgagatcaaccatagttcagttaaaatttaatcaaatcactatcataattgtttgttgacacaacgaattcatctaaccatgcatgattgagatattttaatgatgaacaaataaaataaaataaaaataatgatatgagatcaaccatggttaagttaaattccattttgctaattatagttaagttaagttatattgttagctaaatcattagagaagctaattgtaatattaccgaacagtaaaaatattacaagacactgaagacgcatcgccaccgttaaaagctaaaaactaacccagatggtggaaatcaacggtcactaacaaacacaaacgacatgaagcaaataaaagattgcacatatagccaaaatagacgaaacagaacataaacacgtggcgtaaagaacataattattttacatcattctcatgtcactctaccctctcggctcaacggtgcttgctcctagtgtcgtcgctgtatagcctgcgggatcacaacaacggtcaaaccatcttagatctgatctacaccgtccggtcagataataataacagaaactgagtacgtaccaatcgtagacggtgggagagtttgggtgagaaggcttgtcgaagaggtttgtgcccattcctctagtggcgatgttacttcctggatgaaacacacttctccacacgttttccttacgcgccgatcctggcgtcgtcggagttccaggactcccggccaccgccgccacagttttactactgctcccttctcctacaccttccaaaaaccatcacatgatataattatgagatcatacgtttctacaaagatctgtatatgcaagtttattacggagttatggttgacaaagaaaaataaatacctttgatgtcaaggggttgggtggtgatcttattgcggaggcggccaaggccatgctccggtttaggtccggctacagtttcatcccacatatttctttctttttttgggttgattttggatagaattgtgtcaagtgtgaagtacttactaaagggcttccttcatctaatttatagactcatttttaaactattcgtaaaaatatctcttttcctttgtcgactagttctctcattttttatttgacccacaaaatatctagagaaatactataatagactagaaataattgacaagtaattgataacttaattaccaaatgaagtttatatacttgcacatagaattttcgttaaaatttgatacgtttagccaaaatgttattattctctgtcaataaacaacatgaatacataatataattgtaaattgtgtgttatgtattaatatgtcattttacaacattttaatataacatgcaacttccagggtttagagctaaaatacacgccatctttggaaattaggatgtggataagcctactttaaaggaccttaatatataacattaatgttataatatagatcaaaccattgatcatgagaagcgtgagcagtgagggagaagtgtggaaataaaaaaaatgcaaggtgggtatagagctggagatatggataaggacgacgagtcataaagtgtagggacccttaaatcaaaagaatcccaagtctttcgtggaaaagtattataggaacaacaaacatattttgattattttgtgaagttaatattattaagcaacagtaactctaatcaaatagttttccacaaacccaccatagataataagttcatgatgtcctaatgatcatagtccaaatgattcactaaaatgtttgaaaaagataaaactaattccaaaactgtacacaaaacgtatgcactttatcctaaaccaaaaaccactttctacttacagtaaaacttctataaattaataatgttaggaccgaaaaattatattaatttatagaggttttaatttatcgattaattaattaatttatagagatatttttctaatttattaacttttaaaaaaaatttaagattttttcattatagaaaatattttttaagaatcaattacaagtaaaaagtaatatcatatttagaaaacaacaccaaaattttttgatacaataaaatattagaactcaatatcaaataagaataaatacaaatttaagcaaaaaaaaatattagaaatatattttaaagaaatttcttacatataatgtatatatagttgatacatttctgcaattattaatttgtgatattaatgagaccatatatttacataggattttcaaaaaaattattatcttattaatttatcgatttatgtcattttttccattagtctcacctcgggattggaagaaattattaatttatagaggttattaatttaccgagtattaatttacagaggttttacttatattgatggagaaatacaaaactaaaactaacttctaatttgaaaaatcttggtttcacaaagctaaattacttatcaaatagttaggaaacgtacctcaacattattccatttctttctcttttcctctgcttccaaggcaaccattctttatcacattacttctaaagatcacattctaaatcatattcccaaaggtaaaagaaaactgttttaagcataaattaagctttgaagagttttacaatgtgtacacatttcctccaccaagctcccattccaaccttattccattatcggtaaaggataggaatggagttccaaagaatttaggtgctacgtactaaatctataactgagtaaaagaaggatgacataatgtacaggaatctcatcagtttgagctcatgccacaccaagtgacatttggtttgataactcagggtttaccatacttttcgacatacccctgcaaatgaacataagaattgttagcttatgcaatacttactacttaggtttttacctgctttaagtgtcttttatttccagctaagaaactcacctcgacaagtttcacaattctggttccagacaaaccaagatattgatcaactgattctgtgtcagttggcacctgatgaaactggacagcggcgccgactaccttttctgcagcttttttaactatcatgttatgcacgtctttagttagacgaccctcacgccacaacggtttcaacatttctttaatggtttccacaactgcagtccggaatagtctcattactttcattcctgcatctgacctcacttcaccatctatctcatctgatttctttgtctttttatatgaagacccatcacttctatgccaagaatcatgccctgcaggtttgattcttttcaaaacaactctattctctgcagccgtagccgaagaaatctctttgctaggcgttgctgtatcattttgatcaaccactgacgtagccaccccttccactactccatgtgcttccaaactccttgccacggtttcttggtgttgattttgactgcatgaactgcttttatcatcattcttgcaatcccgtgcttggggaccactagcagaatcaccatctttctgctggcaggaacttttccgtgcatgttctcctttacttgacaatgaatcattaagaggtctgtctcctagattctctatatccgtgaaaggatcgtagagggcatcagacgagggaagaatataaggtggaattgtaaaagatgctttaaaaggttcagaaggttcccagtcatctgaagaaactttctttttagtgctagtagtgttggcttctgcgcctttatcagaagaaacagctaccccttgcagcgttggaagtgatccggatccagataaactattcccattttcaaaatcccccaccgtagaagcacgatcattcataggaacagaactggataatgatcctgtccaggctggtccagcagatcccatgtctgtttttaaataggaactgatagaaggtctatgctcatgaacaaagctgcttctcaatgcgaaggaattggcgttattaataactagagacctgttgtcagtgaaatcagcaccatacgtttgcttcaaactctctcttctaatgttttcaaatgaaggcataaagcgcatctcgttattgaacgggaaaactctctgagaacctgggggattcacaaaagacatggaggagaaaactctctgaggattcatgaaagatatatcctctctggtaggcaacgatgtcacaccgttttcgcttaactgggaaactcttacaccttctctgctgtccaaaattcttctttctgaatagacataagcaaaataaattattggttgattcagaaagagtaattaaaccccatagatattcaccggcctctatattgttggaactacctccacatagaatcacaagaataagtattcatggtacaacgtacctagatcagaccggataccaccgtttccagccatactattttccgccagttgttgactagtgcaatttgaattctctttcacatgtagaaacttgcaggacaccccattgaaacaccaccctttagcaaaaaatttgcagggaagagctgcacgtttttgttctggttcattcccaccaccgccagtgaaaaagcttcttggcggtatacccggagcaggaaatctgataaccgaatttgtcagtataaaagcttcaacctcttaacttagtttcagcaaaacttaagcagaaacttttttgccataccttggtaaagtaccattatcttgagcaaaagcttgctcctttatgatttttgattgctcatctaaaggtgttgttacagaatgcctcttcacatctacatgagacaagtttaatcagtacatattagcaaaactgctgttttgaataaacaaaagagattccttacagaaacaagcacaaaactctgagaattgaatttgcttacttggtattaaagccacaatttttacaaaagagcttcagtgaaaatctaattgccaagtctttgaacctctaatcagagctaaatctagtcaatttaacaattctctctttcttctagaacaaaattcatcaattccaaattggaaaaggtgtttccatcaataaaaacacgaacttgacagaattaatcaacaataccatgtaaccaatcacgaatttcaaatactaaccgttgtgggaattggaagcttgaattggtggtttatcaaacaattcagattctcttacaattgtatgtacttgcaccttttgttcgacctcatcatcatcaatgtccatgtcggaatcagacatcttgaagtcttcggcgaggtaaccaacgcagagagtggtaaattgataaaaaaaaatactgcggcgtgatcggggtccgaagctcgctgttgagtcctgatgatctccgagaatacgtttggtatatcgaaaccaccattgttacaaagaccaccgaactattttatatctaatgggcctttcctaaataattaaagctttagtattaaggcccatactaaattccaaattttaccaactatttcctaaattaacacatcgttgcctttttatagtaaccggattaaaccaaaacaaaattaaagagaatcgaatcaaaccgtgaaaatcgtgaagcgtagtggtgctatattgcacgttaactgtctccatcactgccactggtaaaccctaagaatcctccgcaatttcgcaattttgtgaaggagccgccggctaaatttgatggcagaccaaagttcggagatcgtcaatgctctgtcgtcggagatggaagctgtttccgtttcatcaactcaggcatcttcttcgtccgatggattccagtgagttttcttaccaatcatcaatttttttcattttcgcgcttcaattttgatttggattatattatttgattagagtggaagagatgaaaaagctatagcaatttagaagtatggaatttaaaattgaaaagatcttgttatctgcttattggtctggtagatattgaaattttactaattcttcaggatgagtgaagaagttgagaagagatacaaaattgttaggagtatcggtgaggaatgtatacaagaggaagagctaaagaatcttcttgctaagaaggctgctccgatttgctacgacggctttgaaccatcaggaagaatgcacattgctcaggtctgttagttttcctttgttccattaccatatgtgggaaggaagcgttggctaatctattttggttctgttgttttcttaatagggagtgatgaaagtcatcaatgtgaacaaaatgacttcagctggttgcagagtgaagatttggattgctgattggtttgctcagttgaacaacaaaatgggtggtgacttgaagaaaatcagagtggttggagaatactttcaagagatatggaaggctgctgggatggataatgacaaagtagagtttttgtggtcgtccgaagaaattaattctaaggcagataagtattggcctcttgtgatggacattgctcgcaaaaacaagctccctagaatcttaaggttacttttctaaatcttctccattcttgggacgttgtaattatgtgagggaaatgatgggacctgaatgactctggttcttgtccttgaaggtgtgtgcagattatgggacgtagtgagactgatgaactgagtgctgcccagatcctttacccatgcatgcaatgtgcagatatttttttccttgaggtactgttaagcctttgcttgcttatgaactgtctttgattctgctgctagttactcggaataaaaaatttagcttaagcgttacatcagcagaaagtctattatattgttgataaaacacctgataaaagctccaggctagaaataagctgtatatgattgcagattttatcaatgtaatgttacattttgtgtatctggctgatgagttctgtgactactgttaaaccattttcgttacatatgtaggctgatatttgccagcttgggatggatcaaagaaaagtaaatgtgctagcgagagaatactgtgatgacataaagaggaaaaacaaaccgataatcttgtcacaccgtatgctctgcattttcctatttgacttctgttataccacgttttaactggtctagcgtgttgttaatcatttatcattgttaactacttgcagatatgcttcctggtctccaacaaggacaagaaaagatgtccaaaagtgatccattatctgctatctttatggaagatgaagaggtaactataacttagccaaaattctaagtttacaaaagtagataagagttatcacagttgttgacttgttttgaatgtctggatgtcctcaggctgaagttaatgtgaagatcaagaaagcttactgccctccaaaagtcgtgaagggcaatccatgcctcgaatacatcaaatacatcattctaccatggtttgatgagttcacagttgagagaaatgaagaatatggcggtaacaagtgagttttacccctttttgttcttttctaaaacctttatttgcttggtttctgcatgaaaaatccaatttggattgctataatcctattacataagtcattgagctgtggaattttcttccaaatattaggacctacaaaagctttgaagacattgctgctgactatgagagcggcgagttgcaccctggcgatctaaagaaaggcctgatgaacgcgttgaataagattttgcaagtaagttaaaacttcctttatgttagagctttacgagtccttaatgatggtattagaaaaaagactgacacaattattcagaaaacctttgaataagttttgtattcaacaacaaataattaacgtcctttaccaatatggcagcctgttcgtgatcatttcaaaacagacgcacgcgcgaagaatctactcaaacagatcaaggtaacaaaaacatatatatgtttccggttatgttaattatactacttgagaatttctcacacggctttggttttgtattgtgtaggcttacagagtcaccagataaaattagagagccagaatgtgtcattgaaagctttctctcactttatgaaacttattattaccaaaaacacactgtaaaactcctggattttgtttatttgggtatatcagatgctactacagatagtttaccaatgttgtggttaatcaaataaggaattttatatccgtataaaaaatatgtaaaattgtttttaaatcttgtcgatatatgctactaaaatgtattttttggtttactttggtcttagattgacgtggctgcctcaaactgccttcattttcgttctttttttttttagaaaaaaacaagaataaaaatagtaataatcccactaaaaagaatcatcagaagaaaaaagactcataaatctagggctttcttctagagatcgaagaagaagagttcacatagagagattttgttcgtttcgagattttcttcagtcccaatggcgtcaaacaccagcaacgacaatttccagcatagaccacggcaaagaaacggaccacctcctccgcggcgacagggaagaaatccgccgcctccgtcttcgtcaacgcgaacttctcagaatcagccaccacagcatacgccgcaggagaagaagaaaccggtgtttgtcaaagtggatcagcttaaacctggaacgagcggccacactttgactgttaaagtcgtcgatcagaattccgtacctcagaaaccgggagctgcttcttcttctcatctccgacctgctaggatctctgagtgtcttgttggagatgagactgcttgcatcctcttcactgctcgcaacgatcaaggtgagataatccgattctgtgttctaagattctatttttgaatcatcctctcgaatagccttaacgatcctgtggagtatcttagtctgttggaatctgtattttcatctctcaatagctgataaaccatttgatcgcattccaaatttgttcacacattgaagatttggtgcttttaaatcagtgtagatatacttgtagtttcactcctataacaggcattgatgctatatacaatgctacaattaaagattctgttgatttaggactctctagtaataggatttgttctgctctggtactcaattggtgattcatagtgggtcacttagctttttgggggctaatacaagtctttcttggtttttattgtgtgggtgcagtggaattgatgaaaccaggagctactgtgaatcttcggaatgcaaagatagatatgttcaagggatcaatgaggcttgctgttgataaatggggtcgcatcgaggccactgaaccagctgacattactgttaaagaagacaacaatctgtcccttgtggagtacgagctcgtcaatgtcgttgaggaatgatgtctgacaccccatgtctctaataggtgatatatcaagtgccacaatgaattttgttttgcggtgaacaccgttgcgggtaaaatatatttatcttatgatgttgcaagtttgctatatttatctaccagttgatttgtgttgatctcgggtttggtattcggtatgtactctttcagctgtggatgcttctgtaacctctctacttttgtatggtctttaaagagaaggttaatgaaaaaattggtgaatttgtgtccaaaatgtctttgcaaattagtcaaatccgatacacagttttgattgtgaaacaccctcaaaaataaagaagctagacttgggtagtagtcagaatttgctaataaataataactgttactgaaccggttggtccttacaaatctctagggttagagtcgaatagaattccataagattccttcgttacttgacaatcttgaaggtcaaaaccggatcttatgacccaagacgaaacatgacacagctactgtcacttcatcaccttgctgcgaactgcatccattcttgcccttcatttgagattcttcatgcatcatcgatgcaatctgagcaaatagaacatcatcatatcagtatcgagaaaacataacctcatgtgttgcaggattcatgaaagtttctattggcaattcatgtgaaacactatcataacctaaaacattagagggcataatgcacacatcacacatcaaggttcccctttttatattgaagacttaactccaagaagaacacatgataaaaatggcttacatcaatcacttctgatcattatccttttcatcatcttgacaaagaaaaaagttgagattctcattgcatgcaagacatttgaaatatagttcaaaatttgtcaaattatgccacagggaaggctgtattttagtctcttaatttcctgacccaactactcaagtaaggcgaagaaagcagatggaaattaaatgccaacataaacttcaagtctcataccaaaacaccaattcgtaagtgtataagaagtagaactctactcgtgaaaactgcgacaaatttaaacatcaaaatgtggtcgataactgaaaactgaaaacaagggtccacctaaacaagagagagcctaacagaactagtaaaccaagcaatgacagaattcaattccagaaattcatccatctatcgaacctccatttactattgcacataacctttaagaccaacacaacaacctttaaaagtgacataccaactctacacttaatctacaagcatatgatgaataaacaggaagaagatataacaatgcaacaattaaaggatacagttctgccttatgtatcaaagtctctatcttcatcataattcacatcttcaacaagaagtttcaccaaaaaaagtcaaaaggtaacaaaacaccgagttccactaagtcatttaagtaccttggaaagtccaaatggagcgccctgaaactgaaagcatcgaattgagcaaagcagaagcagtggccgtgtggtacggtagcatcgtctcgacgcagcagctcaattccaccggagatcttcaacacatttcacaattgacaatcaaaattaagttaatcgatgttttggagtagcctagagaaggtttcactctatgtttacctgaaaatgcggtgagagagaggactctgtttaggcaacttaaacgaagaccgcgcagaagacggcataggctttgtcgaccttaacgcggcaacggcggctcggccaacaccggaacggaagacggatctggcggcggacattgaaagttcccgattctcgttggagtaggatttagggtttttcctgggtttagggattctgtttgggtcaaagaaaatctgttgagctgttgacttttcaatacagtagaaagtcgttgctctcactacgttacacgtgcaatgcctaatgtttgacgagagtgtgcatgtcacgtgactatgtatttgtgtacctttttttcctaagagaattctttaatccaaacaacaagagttttactaaatatgtagtatgataaaatgttaatcttgaatagagagtcgacgtcaaaaattctatacaaatctgtagtcggtggtttcactatgggtcattagaggttcaatcgcaaactaatcattgactatccacattttctttgagataaattatggtcaatcgactaatacagaaacaatcatcaacagcttcaatagtcagacgacattgatattagtatcttatattttcttgtacataatgcaaaacattttaatctctatataaagaagaatagagattgaaccagcatcagaacattatcataattaacaagcatcgccatataatatatatatttttttttccaaattttatatgcaaattaaaattatacttttgactgatgattaaaccacttgaaacaaaaatcgagaatacaaaagcagatacttattattgtttcatgcggtgatgctcatggagtgatctgatctccttgctcttcccccaacatctcggactgttggttggaatcgtatggattcttgaagttggacttcttctcattgtaaccggtgggcttgtagttgtagtaatgattctggtagaaacggccgtggtttctgtcatcgtcaaggtcgtaatagtacttaccattcgccatatacctcgtatcgctcatcccttgtctctctacgttgttgttataacccctgtacgccggctccttctctctcttctccgtcccgtaagtattggggttttcgtagtagctcgtgtccttgttgctataacccttgtacggatcattaatatcattatctctcttatctgtcccgtaagcattcgagttttcgtagtagctcgtgtccttgttgttgtcgtaaatctcggtagtcttaggatagctctctttgtagttcttgtaagattcttgggtttgagccgtttcgcttaggctgggggtggagaaagagtcgtcgtagttaacgttgtcctcgtacttgttattgttcaactcttcattgttgttgtcggttgtctcgtgaccatacaagccgtacccgttttcggactgggggataaaggcagggttctggtcatctggctctttcttctcgttggtttcgatagggacaagattgttagggttttgctctttggggtcctctctttggaacttgccaaaggagtagctgtttcttgcactgatttgggttgagaaaagaacaagtgttaagaggaagaagaagagacatgagctagtggaaaaagccatggtgatgatgtgagtcagtgttgtgggtttgtgagagaaagtgggagtgtttatatataggaaagttttttttttttccttttgcttactatatagagtgtaaatggttaggtggaaataaggactgaattggtgataatggttgatggcgtgtccattgagatgagatgattttttcaaagggtagctcgactttttgggcctacgtaattaacttatcagaaaatgggtaactaattttaagcaaacctatgattagatgaaatattaatacctaatcttgcgagtttaaaacacttattgacaatgaacatgagcaccatgccccgtaaggatggggttgtagtatatattagtgtttatgcattacgagattttcactaaaaatatcaatggcttaatgagattttcacatccaaaaagggtttatctctaataacacaagttataataccgacaaaacatattaaaaacaatgtttgcctgaattagtagacataagcaaatattctgcataccatctggagtctgagtatgcgtagtgctctaatccaaagataatagtattatggtttgacccaacgtatatatgcgttttctcagttaaactaagtttatagtgtttatttccatgcattcaaaagtttaataatcatacccttttttgcaattgtagtaactaaatacagtttctaagggaagaagaaaattagttgacttaatgataaaggcaattcgtttttttttttttttgtcaagcaatagaaagaaaattagttgacaaaataaaaggcgggagaaaatggagttgcaaactccaaaatttgcaatggcagagtaataatgggagacgacagagtaataatgggagacgacagactttgggggtagccactatagggacaccgtcacaccgataggttcgataccatatatatgctttccgagcctaagtatgcatgcctctacgtttgatttctaattccaaagtgtcaggcttaaaatagcgtctactagtagtgttttttaacaatggcttcgttaaactacatgaattttacgaacacataacatttcactaaaactactagcagttgcatatccactaccaaatcatataacactacaagtcatgatttactattaaacaatcgctaacttaaactagaaaatattatctaccctatatttggccaaagggaaatatttgtgtatcaattttttttgttcttttaatataccggatttagaaaactattggtctggttctcactaacatcgagtgataatgatccataaataagcgaacataactcgttcgtaaatcttaaatatttttacctaatacaaattaatgctttacaaaaaattcaagcaacattgacttgtgtgagtatgggagctagagttggtacttcttcttttcagacaatattaagatagatctcaactgccgaaaaataaaacgaataaacggctccacaaatcttttaggtagaatataaagtaagattattaattaaaaacttttgatttggttatgaatagacccacaaacaatacaagcaaaggttgattatctacattcgttagatttgtcaaggtactagggatatagcaaacgtgacttgcagttggaactaactaattaggacggtgggtttaagagatagtgaacgataagcgactacaagaattgatacatccatcaattaagcattgcataaattataccactacacgttggtacgtgtatattccaacaacatttgatagaagattagcacgtcaagtttgcatgtggcttccgtaagaagctgcaagatggacaaccatgtacactaaatacttccattatcgggtattcgatggcatgagaagttttataaatataagtatgaacttcatttatatgaatctaaacctttttctgtgactgtgagatttctatttagtagagaaaggaaacactcacaaacactagtttcaccaaatgcatccacactctttagtctttataatcccgcttggtaatcatcctcatagatcattttagttcttttacttgattaattattacctattatttttccgttaaaatttgagtgttctgctaattagctaacctacaatatcatccatttctctgccatattttacaaaccttaagatttcaccattgctaatcctatataatccaaaagaaatattaatccattcctccaataaaatagcaccagtctacaacatactattctgctcaagatactagtactactaccactattcaaagtcctttattatttttgtttgtaacaaattgacaatcatcactactgaacattttcaagttttaagcaagacaaagaaatcaaatcccaaaaaacttgttgggtttcataaatgtgaccctatgaatgatggatgctacttacatccaaacggaagaatagaagacccttgaaaccaaaccggatcaagtcaaaccaagtcccttgaaaccaaaccgaacaaaataaaaaaccatacatattaccggttcgatacggccggtttttttattacactaaatccaaacgagagagtattgagtctatgtctcttcgtcttcttcattacaaaacacacagatcttgtttacaacaaattcaataacttacagataatctgtaacagattcaccaccataaatttactcaggaagaggatcccataacaagagagtaaacaaaagcaaattcggaactaaaagaggaatatatggattcacttcattcaccaatctcttcctcctcagcctcttcctcgcatactctctcctctcctctttcccccatttcccttcctcaactccgacagccataaccgccgccggtggctgataatacgggctattcgacctccacgatgtatcaggcagcccaaatctcgatacccttttgaagaactgagaaacccaccattgacggagatgcgtcggcgaatagaccggagggtaatcccacgatacgtagtttggaattatggctccgatgaagaattgagagtaaagtgatggtttcgttgttgggtttgtgaggatatgtgtcaccgcttgtattctctgtccccatgtcgtctcctccattggcttggattacgttttctttgagtggcacagagagagataacgatatcggactccttccggttaaattagaattacgaattgaaccggttggtacaaacacaaataaccggaattgatgcaaacactttttaaattgaacctaacacagaacattcttgaaccaagtttacaagtctctcataagtcacaacttgtgacattccaaaagttagcagcaagtcatcatcaactaaaataagaactttacttaagccacaagcaaataaaacacagaaaccaaagaacccttctagagagcaatgtctagcaacatgtctctcattgcatagatgtcccttccttgcgaatgatgatgattgctttgaacagctgacgcacctttcatggaattcccttcaacgcaggggacagccgtcgcagatgcaactgctgtggtttcgtcggttaatgggaaaccaaacagcctgcatctgcctgaacctccgtgatggtcttccagacgtccgttaggactgttcgagttggtaagcaagacggaagagggtgatgatgatacagatggggggaggatacgtgtactaaagttctggaacggcccacaccaaatgttcctctggctcaacccgtgctgctgccgatgatcggttattgagtaggcgggaactgtttcttgaccttgcaagaccttatggaaaccataagagtcaccaaattctgttcctttgaagcggcctctcctggcaccggctccaccatccgaacaagtgttgataaaacccggaaaaatttcttgaccttgcaagaccctctggaatctcaatgattcctcaaagtctgtggcgcgaatcccctctgcaataatagcagaaaacgttatattacaggcgataaatggttatatgagtggtacaatgtctttggctaagtagatgtgtaccagagacagggatatcaggctttcctgaggaaaagccaatcctgcttctcttgggaccagttgttacgaagctgcctgaattggagatggaaccagatggttcgatctcccatggcgagacacgctgttgatgcccatttgccacaatgtcgtcccaccttacctgaatatgacgtcaaaacatagtttcagagcagtgagcttacggatatagaaaaggcaacaatcttatagaagacctctcagaccaaactaatgacttaagaacataattcatagcttaccaaaaggcatctccattttgaaccaggccacctgattggatccaagtcgctgataccacttataatcccaggggatctgacaaaacaggtgaaacatgttagaaagttgggcatataaaacacaggtgtgcaaggttatcttaaagcttgaattataagtctataagtaaccttctctcagatgcatcttcagattcaaccctcgctttaaatctcatcccaatgcaaaagggatagtcaacaaccttcaagaactttggtgcagggattatgaagtttgaccagcttgccctgaaaatgttttaccagtgaactagtattaatgctaaattcctgatatttattggagttaacaaacttctaaggaacaatcaactagaacaatacacaacttaaggcttcaggagattctaattatgattctgaaatgaaattttaaatgctgaaaacgaaaaaaggtcattgtggttggggcttacttggggttgtaggaaatgctgaaaacgctatgggtcgatatggcatgagctacttcagagaaattgttgtggttcatattctgattatattgagccgagagagcagcggtgccttcgatttgagaagctcttctaactcccagtcgcagtttgccatcatctcctctgtatcagagaaacccatatatcacaaaacctcttacagaaaatcaaagaggttgtgtagtgagaaaacatagaagcatttttaactacctaaggaaaagcacagcatcaccagagacaagcttcttcttgttcacaaacgcactccacccggtagtgagcaaatgcctcctaggttgccctaaaagtcactcaaaccattcaaattttccatctactaaatccaggcaagaaaaattgcaacataaggcaacaaacttacctcgataaatgtggcgaaatcgccactccaggccatgaagatccctagcaagaagctcctgagaaggccggggctggctatagtcctacataacaaaatgattatgtagttaaaatctctcaatatgagctaataagagaactctagaacacaatgtgcaatgtacaaagctgattacagaatctacagagagtggattagtaccagaggagggaagcaatcctcagcagctcggcgaggaacagagaaaccaccatgggtgcttgtatcagaagcagtaagggttttgcaaaacatgtgaggagtattagacctcttaagcacttcataatcttcctctccaccatcaacatctataattccttcacgcaccttcctctcaatgtcctgtaacaaatcaactcaaaccccctaagctcgagcaaatttctctctctttgttacaaaactcaagagcctaaagaaaaactcacctctgactcaggaagaagagagacttgagcataaacttcatctgtagtcgtctctgcctacgaaatcaaaatcccccacattttgtttattaatcctcacaacaacaaaaaaagtttaaacctttacagagaattgaattgttctgaaatcaattgtcatcaaaatggagcaaaaggcgaaactttgaaatcaaattcattatcatcaaagaaaaaactgaagataatttatggggatttcaagtattcgtcatcaaaatgccacgagaagaaatgcaaatggagcaaaagaggaaacttttctcccaacataaattcgtttgtctcaaacaattcaataaaccaaaggcacaaatctccatacttgtatcgaaaacccaactcagattcaccaaacaaacaattaaaaaaatcaaagaatcagaaaaacagaacaaaacccatatctctctgctttgagagcagaggagaaaacataaatgaagaaaacaaaacaaaacaaaaaatagaaagaaagagagagttagttacatacgtgaagcttaacatcgagaatacgacagaacacgtgaggagggagcccgtaaatcgcggcggagaaatcgggggcttgttccaaatgtccctgagggaaatacaacacaaggcttcctctttttggtagagagataaggggtccagcacaagcatgccacagctccaaacaaacccctccaccagcagaattcgaagacaccacagacacagaagctgaagaagacgaagtaggagagacagacccagaagctgaagacggtgtttgcgtttgcgtttcgtcttcctccgtctccatcacgttcagatcgattaaaccacccattaaagagagagaaacagagataaagataagagctttattataagaaagaaagaaaaaaaactcagaggagtttcttcatgacttttaccctctcagccaaaagaagagagagtagtagcacagtgatgagtgagtctttaagccgtggagaaaaaaaacttttctattaaagaaaaaaaaaaaactagaaaaaaagtttagatttttaatttggacaatgttaaaagagagaggagagagagaggtatcagagaaacagaacagtactgagtgctctctgcaacagtgaggctctctgctacgtctggtgactgatgtgtgtggtgtggcttttagaccttttgtgcgtggagagagagacattagatgggattagatttttgaaatagattgatttctttgctttctctttatattattattatcttttacacaacagtttctttgcaatgttgatactattggattttagtactgatataataattattgttacaagtatatggtttttagttaatcatttatatataataagatctacaaaagaataatttcgtctctgttgtctctttgtctttgaatcatttttattgatattattgtgggagaaataaaagaatactggtggcatacttttagggattgatgcacattattagtgaaatagtttaaatcatttatccattattatatgactagttcatgtggttttgtgttttgtggcgaagatttggactaccgttatattctaaagtacattgggggatagttttctttcatgcctttgattttcagtagtttagtatatggtgaaaagggttgtatatttttctgattaaaattacacctttgtgataaataatcagtgtttattgctgttattcgaattcggaactagttagatggattttaaaaatattttagaagatcatgcattagtatatatatatatattggtttgtgctaatgttattgatctatcattttagtaaacgatttaatacgacctattcatcatcgcctaatcacattgttcccaatagatcacattaatcatagtcgaccacattgtttcttcctcacttcttgttgtatttttttatgaagaagaaacacatttgcttactaaatttgtcatcatttttaaaccaatggttggaatgacttgataccatcatcaagtgaaagttaacacattttgttgccaatgtgtccaaatttggatttgatttgaaataacattttattttcctctaaccaaacgattcaaaataacaaaaccacattaaatgactaacgaggactaaatttgaaacaaataacttcgtatcttgtgacaaatttgatttgtgagctagatctaattttttttgataaaaaaataaagttaaggcaagaagaaacaatcttaagaaatttgtgcatgaacctgttatcaacggcgaataaattgatggatacacaagtcatccgaatttctaaagaaacctacctaatggctattgtaaaaacaggaagaattattgcataagtacaaagtagggtccattaatggtagggcatattgagagaaacaaatggtagagattatatatgtttttggtaagatgaggtttcgaaaattcttataattatgtctacccagatgaggaactagcctaatcatatcagtatatcacactttgaattaaattagagcttaatacacatgcaaacaaaaacattgttcttctttacctagtacattgttcactcctttcagttctatgcaaaattagatcgatttacacttgaactagtgatgatgctatatgaaagaaattacaatgtttatccttgagttgtgttagatatttcgcaactcataagtttatttttttcccacatactaataaagttcggaaatgttttttattgtatataactatggtttgtgtacattaaatctcttgataataaatttaatcttttcataaataagactatttatgtaacatattgaatttaagtgcagtgtacgttgatttttccaacggcatcaaagtaaacgagagatttgaaatgtttttcttttcttttactttttagcttcatatatcaaacatgcaaatatcttatctattgtctctgctaagtgatattcttataccgttttaaatctaaaaatactaatcaacttcttttactaataatacttactatcaaaccacaatttgaatatcttctctttttcctacaaaacattgttgtacatatgtatagagagttaaacacaaaccaaagcaaacatgaaaagtacccaacattttctttcattgccgattgttgtgagaatgaatctcatctcaacaacaagcacaatgtagcaaacaagagaacaatgaaagtacaagtaaatacaagaaacatgcaagggtagaaatgtaagataaaaagaatctgcaaaaaaaaggacaaatagagaaaaagtgagaagaaggtcttaaattgggagtgtcataaattacaaagaacccgaggatcaggggggacttttttctttctttctttcaaattttttttttctctataaataaaaaagaaatatgtttttgcttattaaattttgatgaacacgcgagacagtgtagatgtagatagatacagctatagaagagagaggcacaacaacaacaacaacaacaacaacaacaacaaaagtggtttagagattggggcaggacccggacaaaacgggttacaaatccaaatacccaattggttaatgccccgacatctgtttcctatcttcttttggaaagtctctcgagcctcacgctcttcccattgcgcgtattcttcacactctctttgctcttctttggtcttctttttacccgtttcagacactgttcacttacttcttcttcttctacttttttctctctctctcactctctttgcagtagaacttagccccactttcattcaatgcttcgctttcgtttttttattcattcgagggttcaacacaatttttcctcctcccaatatttatttttgagattgtgatttataaaactatcaaatactatcaagttgtatcaacaagctacttttcattttttcatttgaaacaaaaaaggattatgaatgacacacatgtgatcggtgttgtacttggagttgaacatgcgcgacacatagttttaaagacaagtttgaaacgaataacacatttctattaatgtttataaacaattgaagaaaagtttctacgttaattttattgactttaggggaaaaatgattctatcacttgatatagtaagaaaagaaaatgatgtttgctatttttccttattttgttgatgtatgtttgttattcattcatcactattttttttgttaacattgtttagtttagtttgttacgaattgttctatcaaaacgaattgcatatttcaactatagcattgtgtacatttaaattttatcaatattactataaaataatagactacttattatggtgataacaaacaccattagttcaacagtatcaagaagatacttataaactaggtgagacatgattacaaatgacttgacaacatagaactaaaactgtccttaggcttttacatcactatctcagacgtcccttttttttaaaaataaattaaatatatacggagttatgtgcgcgttggtacacgcggtgcaacagaaagtaagggttgggatacaatttgttttcgaagagagtaaatgaaattttcttaagaagaaacttttacttttgtgtttttgactgattactatttcgggcctttaaatccagctttaatcagttgtgtcagtgccacccaccgcactaagattgattcataattacatggtgcgttttcaatttgatgcatttatttatttattttatgtatttcatgaaacaaaatattttcttttctaattaagagattatgattgttttgacttataatttcttttggactaatgacccgaacatacaaattagtttcccatccatcatcaagacttgattatgtgatcttgagatgtcatttttctttaaaagtccactagtaatgtagtacactatattaaaactacattatttttgaaatcaaacatacttaatggatttcttctcatgactatttttaagttaattattgttatgaaactatacatttcaaaaatgaactgtgattttcataacataccaaaacatttcccattagaaagcagtcactataatgatctttaatttactttgtaatttaaatacttgtgcattggatagttatattttataataataataaagctaatacatgagctcactcaaaaaaattagtgaagttatcaatgaatttcaaaataaatataaaaccaatatatctcataaataattcttaatttcttgccccaaaagttaacttttccaacaagccaaaaacacaattttttcttttttttgaagtccttttataagtgcaaaagtaaactgtctactagggagttttagtttcaaaaacctagtttatgagtaaattgactaatgactatctacaatttacaaaccaaagaaatgttggcgtattaattcctctcattagtgcgaccataagcagatataccaaacaaaaatataatatccaattatttgttttttatttatactatacttttacgtatacgtcctgttatacgtagataactagatataaaaacgtattgataagacccgttatattcgttcctccataggctgaatgtatgatggaatggtattggtcaacgaacagaaaattgcatttttctgaactgttgtaagaagaatacgatttctgaatttatggaacttttgaccgtcgatactaaaaagatgactttaatggtaatgactaatgagagagaggaaataagaatgctataagtacataagtaattaagaactccgtataggattgctcatttaaacatctactcgtattatctttcatattttaattagatcagaaacttatgaaaagttttatctaagtttttcatataaatagaaaaaatcaaatatactacgtattcgagttataaatttcatcttccacattgataatcaatccattagttgagtataacttacaaatagcattgtcgttagcttatcctattatattatttgggaagtacattttaaatataactttaatttttgtaagtaactacatatgtatgccattagaaataaaattttaaagagtaaattaatttatctctttaaggattaaaaagttaaatactaatttaattaattaaatttaattaaaaaacgaaatacgttataaattttcaaaaataataaccaatcaaaatcaatatataagatttgatatctaaattttaattaatttaatttaattagaaaaacgaaatacattattaatttccaaaaaagtaacctattaaaatcaacaaattagatttgatatctaaattatcatattaattttttattaattattatagttcacttctcatctttatatgattctatttttgcgaaaaataatatcatcattataaaaagaaaattagagttttttcgcatatgcaataatttgaatttttgaaaacgaatataaactgttcaatacatgaaaaaatattataacgggtgaaaaatagatttaagaaaactttctactgagtaacgagtcataatttgaaatatttatattcaatttcatacatattatattgaaaatttataatcttatatactacaataattaataacatattagatttttttatgtgtatgatatgattcaatttttaatacaagctggaaaatcctagaattgacggatttagatcgatattaatacaagatggtatactacaggtgaaactcttaaattaacaatcaaactacaagtgtataatcttaaacactaaacaatatagataatatcaacaaaacatatacaactcacagtttacttttaatattttatatacaaaatcaattaaatcataaattaaatcttaatcacataaaaattagcacaaaaaaagtattcaacaattaaatttttatcaaatctctgtgttatataagttttgatactatattcgaataaagtgtaatataccttttcaatttgtattctttaactaatttaagctaactaatatatttgctaatcttatacctatcgaaaccgactatcgtttcttatctctatagtatttttgcaagacttttttggtggatttgggtaaaagtgcattcgggtcatatggtacattcccctattaaataaaaatggtatactcctatgttattagctaaaatgtttagattataatttagagtcatatcattaataaaattaatattaataaaataaatggctttttggcaagacggatttggagtgacgggtttttgaatcaacattaataaaaaagtaaaatataattaatacaccgtttcaatacgggttaaatctttaatttattatcttttaagaccactaatattaaacatatcaaatcattctaatttagaaaatattatataaaaccaaaaatgttatgtggtacgtataatgttactatatataaaatataaatgtattaaagaatgatataatttgcaaaacttttatctataaaaaataattcttaaattttaaaaattactactttaaaaagaaatcacgggacgggtaaagaaattatagaacgggttttattttggaattgggttatattgtggatgtatttgaatcaatatttataaaaaattaaaatattattaatatgctgttttaataagggttacaacttcagttttttaacaattgtctcatagattcgtggtatagctttacttaataacaattataaactgtaaaatataaatattttataaaaataaaatttacaaattttaatatatattatttttaaaaaataaatcgtcccgttaaaatctagtattactatattacaacacacaaaccacatgacatattagagtcagttaaaatattgtccacgatttctaatttcagtaatttttattagttatatagacatagtgacatcttttagtaaactccccaactccaaaacgatatagatggtggtgcaaaagatagaactatatgtacaagatacaaatttacttttgggagtttctctatcaagacaataaagttatatacgtacggatgatgattatgacaaaacatgattaaagagaaactcgtggcaaaccaattatactgtgtttaaacttttggcagtgagcatctgaaatttctacttatttttagtgtgttagtgatgcagccatggattttgcagacttgtgttagatgctatgatgtaatcttttggataaatgagcgttgggttggtaaatgacttgtatcgtgtcccaccgagtttagtggaactcaatatcttttttttttcttttttaaatttgattatgagacaatttgacaacgtttttttcatacttcattttagagatgaactaacacttctgatgttttttccccttttttgatatttcctctagttaataacacttttcttttacctttttgatatttcctctagttcaaaaaaataattattagttgatgatattgtgcagtgatgcaaaacatagatagttttaaagtatataaatatatgtaaaagatcttaggaacttttgcaagtttttttgtaatgtaataattaaaattttagacaaaaaaaattaggttcaataaaatgcttgtatagcaatgcaagaaaatgaaatcacatcttccacaattttgagaaattagttcatggagacaaggaatgaatagtcgttttcctaaaagggtaatctggttttgtagacttgtgatcaaccggttataaaagaaatttctgtagcataatttacgttgataaatcataaatataacgatcacaaagaaaatcttctttgaaagattgaaagaaacatgataggaaaaaaaagatccgaaacattttcgttgccttaaggcctttgactatatttgggccggctatgtatttcctttgttcttgcccattgattttgagacatgcttctctagataacagttgaaccggtgtaccggacggtttagttccctttgaaacactgaattatctccatcatgtcggtctgctttgtagggacttattcacgtcggcgttgttgtaatacacgtgacaaatcgatgtgaagataatggggtctcttaagtcatactttaccaaaatagattagacttgtcgtcgtctgtaatcagaagctctcgtgggcctttttaatcatacggccaaggaagaaaatatcttcattatcctcttttgatttgttgagactttttttttcttgcttcggagtgaaaacaaaatatataaataatgtaaacttaaaaagggactctgaagtgagaatttggtggatcttacgactggtcttcattttttatgatttgatgggctttctggtaatcagactctgcagttttgggcctgtaagatttgggccataaagtttctctcgatcacaggttctatgctaaaacagttctgtattcaagttacatgattgcatcatttttcagttttgttacatttgattcaatcctgtagcatttccattacaccgaaagagataaaagaaaaaaagaagaagggaaaagctcatttctgctatgtcgcgcagcaaccagatttcttgacggctgaaacatcatctctacttccgacgttaatcatttgtcctttaggcaaggcagtggttggatcatctccagcatcaagagccttcttgcttacaactctgtaaatctgtgtaagaacctctgtgaaagcgttttctacatttatagcttcgagtgccgaagtctccataaagaaagtgttctctctctctgcaaaatctttcacttcttccgtagagatggctcgaaggtgattcaaatcagctttgttacctacgagcataatcacagtgtttgcgtccgtgtggtctcttagctcctttagccatctttcaacgttctcgaatgtcacgtgccgtgtcacgtcgtagactagtaatgcaccaacggctcctcggtaataagcgctcgtgatggctcgatacctaattgcaaatattcactgattaagaaaaatggaacacatactaaaagcaaaggtggtgacaaattgttattagggtgtatggatacttcggtttagggttgttattagggtgtgtttaaccaatctgtctatgaaatcatttaggtttgattagctacattaatttaagcatttggatttgtatttggtttagtttggtttatgtctacctataaataattgattacctttcttggccggcagtgtcccatatctgagctttgacaatcttgtcgtcgacctggatgcccctacgtgtggcaaattcaacaccgatggtcgagcgtgagtcgtggctaaagtcgtttctggtgaatcgggatagcagatttgattttcctacaccggaatctcccgttaagacaaccttgaagaggtaatcgtaatcgtcttcagctttatatgttcccatatctggtcggtactcttttgtctttagttatgacgttccaagaagtttggaagacaaggaacacgatccaatatctgaagatgggttttgttatattttttttggtgggtttctattttttgttttaacgttttgtaaattggagaggaaacgaatgttgaatttcagaagaagagacagaaatgattcagaaaatcaagggttatcctctattttcctggtcataaaaatttgggataatctaaatatatatctcaagattgatctcccgaggatactagctataatctttttgtgtgatgatctttgcttaggttttctttaaaatgggtcctttaatgtcacccctaaaattttctaaaataagaaatcacccctaaaattttctagatgtcaaccacagctattgcaaatatcacattgctgttaagatacataatatattttatagatgacaggctctaaaaacctcaataactgcagtcttcgtttaagtaagtacacattactagattttgtactatagtggtttttactactgaatatttatcatatcaaaattcaagaatgattttgaggctaacgaggtgaaaccgtcgctactaaaaaatctttaagttatgtttatacattacaaattcaaaggttcttaaaaatctaaaaagtgaaagtactgaaaaacgcaaaataaaatggctatataatatgtgtatggttatggatgggttctttgaaaagagaaaaacaaaacaaattaaacttaaactagttaaaaaaaaaaaaaaaaaaaaacttgaactagttttctctgtaattcagttaatttgttccttaagtatattgtttattttcaattgaaaggaacatctaattgtgataaaacgaatttggtgaaacaaatgcaaaggtgatcgatatcattatttttgatatttgaaatctgataacatgatattatatggttaacaaattgaaaaataagaatctcttattttttgaagactcaagctagatatgttaatattggccttgtccaagtttatacatagtaatcccagtatatactttgaatgaaaaggacctcatattattacagtatagtttatgataaaaattgttttttcttaatcataaaattctttagagtctcacctacgactctaggcaaggctacaagatactgcaacatgagatctagttgtagattcatatatcttatccttatcattcgcaacatctcgcttatattacaagagatctaaatcattataggtttatcaatattaacatcttgggctatagaaaaagaaatatatattgagagagagcagagagtgaacatggagtgagtgtcatatgaatatgattcatcatgatgaggagaaagagttaatatactgttgtgtcagttttggacgtaagagaaagtttgtcccacttgttggtgaatccacagttcctctggtcaacactcttctgaacctatttttttgtttgtctctttctcttagctttctattttttctttcttgtcacttcatagatttctatttacactctttaatctcatttgttttcgtgataacttctaaactgcgatcgtaattttctactttaattggggaaaaggccaatagttcctttttaaacacaacaatatcgatttggttccgttatgatattattatgttactatacatagctttttaccccccagttgttacaatacatagattttgttggtttttaactattaagtgcacacggcagcgtagacagtgacaacaagttgtctatacggacaatcagatgtccaaacttaatgataacttattcttaacttcacatatttttaagacgtaatatgttgcattgtgctaaactataaatgatgagttattatatgatcaataataataatgcggtgataaattaactatgtgagaacattgtttaggtttctagttttaattataattatatttagtaaggaaatgggtgcaaattaaatgttgttttgtagataaaagaaaataatataagcatgggtaaagataacgttaaagcgacaagatgaaggaaacagtcaaacagtagaaagtaggactgtaggaccatgtttttattgagaaacatttgtgtgatttgatattacatttttattatgctcttttgacatctgatttgatctaacaaagcccctacctagctagaccttctttgcattcaactacaattatttaccagcgttttattctctttaattcccttgaatactccataaacattgcagcaagaaaaagaaaaaaaatattacattgcaacaaggtaaaatattagtatcgaatcgagagttaaaacttcaaagcaaaggatcttatcaactgactgtcaaaaactctgtttcctaactttgatacgttacttatttattttataaaaaaaatttgttttcttttgatgaaaaaatattcagattatatattaactctgaattcagattatacaaaaattcataacgtggctatgaatatcaactattgttaattagcataatttcaatataaatgaattgttttgtttttggcattacaaattacttaattgattccatgcattgtgtagttcaaagcaatatttactaattaattttatctaaaataactgaaactatttttttcgtactatcatcattcgacgcatttttatattaaaagaactaaatcatctttgaaatcgaattttcatacatttttaattttaaagggtaatatatttgatagagtacatatttatttattgattttttatataaaaatgagtgaaccgtctataatttataattaataattatattagtgtaataatgcatttctgaagaggggatggattaggtgtagtataataattatattaatgtaacgttttaatccccgggattaaagtgaaatatcacctcacacgtgaactgtagtcaaagttccctacttcccgcatgtaaaccttacatcacagtctaaacactaaacataacgcatgacctaattcactttcacactgggtgatgtgatgcttctacattactcatccccatattagcgcattgtttaacaattccacatatataatcaatttttcaagaagaagaaacagaacaacattatagatttctttagataataatgaaacacacatcatatattattggtcaacaatttaacgagagagttttgtgaatgttgtccgaaactcatacataaacaccgtcacaacaggtaactgaaaccaatactttataaaatcttaacatttaagcctacgtacgagagatggtgaaagaaagagacaggtcttaatttcttcttcaaactcaaatctcccacacgactagatctgcaaaagcagaaaagagacctcgaaattaaatcacataaacaattatatacacacacatgcaggcacatcctccgaaatatggtagtattagaatttatactacaaaagtcaaaatacacgaaggccaaaaaaagaaaaaaaaccccaatgaatgctctaaagaagcgcaaggtgtgtgtgtgtaattaaattagattgagtcaacattgttgacctaagccaaacaacatgtctctcgcatgcatttatccattttagatcccaatgaagaaataaactagtactaatatagatgtataaactataattatatagacattaaataagtattcattttaccatagtttatttaaccgatagagtagtatctagctatagtggaaccttaattagtataacaaaggaaaatagagaggaaacaaaaccagatagtacgaggctccgtgttgaagagggtgaagagcgacgccatattcatcggtgacaatgggctgacccgcggaattaatcagaacaacctcttccccaaatgcatccctcacattgaacggtcctgagctcacttcaagctccatttcattgatgaaaactcttattcgtgcgtccgctgcatccatatttagccattgttatcccattatttcatgttagtataatgactataacaatctatataaaacaaaattgtaaagctcacacaatctattttcaagaaagagagagagggtatatagaaataaagaatcatctaaaggctactaaacatgaaggttttaaaaaaagatttgtatggatcaatgtgtcccttacattgttgacacaaaattaatgtatctctacgattgagtaaaatttcaacatgtatataagtaatctataacttaaaaagggtgataactttatatattaacattaccttgaacttgaagctggtccgaagttgatgggacagtagcgagagaatgcgaagtagtaatagtggtggcagtagaagtagtgggaggaatatgaagcatgatgttattgttgttgttgttgttgttgtaagaagctatttgatgattagtggtagcgtaacaaatctgagtctgtggctgttgcaacatcttcatcctcatttcttcaacttctttctcactcaagtgttgttgatgatgagttccataactcacactaccgttcatgatctcactcagcaggagtccggtacacgttggagccggtttttgttgctcaatcatatcaccggagagaaaccctaattgggatgagacggtgataccttcaaaccctccgacagtggagaccgggaagagaaacgccggttccggtggaaacatccccatcatttgactaccacccaaagagagattagtgttgttcttgttcttgctttttcggggtttggtggatttggaggaggaagaggaggaggaagaggaagaggaagccgaaggttgcggctgcggctgcggttgcgtttgagggagagagtgtttggagtggttgtggaggaggcggagtttgtgtttactacgggacttacggttttggaaccagtagaagacgttagcatcaccgacttggccgtattcttgaagctgagccctaatcctcctgatctcctctcttggaggattcaccatcccggagttaaagattgcttcaagtatccgaatctgctctggctttggattccatcttggttttggctctggactcctctccacttcacatcctaaaaaattcacaatctcatcagataagagttctttaaaacaaaatttagttttgaattggtaaatatgtagaagtagaaggacctgaagagaaaggagaagatcggtgagaagcagaaggcaagagaggagagttgatgtcatgttgccattgatggggatgaggtttggacttgaacatgcttggccagtgtctattcgaagaagccataactaattaactcgatccgcagaacacagatgtatgtgtatgcatatgatgatgattgatgttgaatgatgatgtgatgatgatgtgatgtgtcaaaaagagaggaggaagagacagggaacagaatggctaaatggaaagataaataaaaatgtgaatagggcaaaagggttacgacctctttctctccctcttatagcctctcttcacctacccaacctgttttcatatattcattcatctcttttacataaatttaatttaaagtctcacccatatttctatacaccatttctctttctctctatatctatgtatctatctatgatgtatagatgtgtatctatatcattatgtgtatatgtttagtaaagacaaaaaaaactatcactacttctcttgtttagggaatcaaatgaattagagaagtaggctaaatcctattaacagaaatgttataaaagaaaataggaacactgttttcattacgttttattattaactacttcagtcaaacagtatgatttagttgcatacttgcattaaatagttttgaacaaaaaaaattgcattaaaaagtaaatttattaattctatagaaggtctttgatcgcttatatatagattatgaggagcactttgacattttagatttgaatccagttttgcttgtcatggttcaattatgataaaataaaaactgttttaggggttagttccctttagtgtcatctagtgggaaaatgtgtatatcaccaatggaaattcaaaaggcattattacagtattaaaaaaagagtgacaaggttagtatttaagtacgtcaaaatgtgctagtcgacgagtagcctatattgctataacgttaaatcactgatggattgaccaatacttcaataacaaatagaagaagacaattttggaaatcttaaatttcttcaacagtcatttgattagttgtgtatcatgagcgtttcttttagcctcgcaaacaaatagaagaccgcatgcattcacactgtctaataaaccactttgagagtccgaaggagcttcactgaattagccccaaaccatatcaatctcactcacaaatgaccaaattgatagcataccctgtggcgaatgcttaataccattaaataattttatcatttgtgtttttcatatatgtacaaaaaaatccaaaatccatatgaaaataactgatagagagactagttatatgtgcccaaaaaaaaaaaaaaagagagagactagttatatagatttatagagtgggtactgaattatttaaaaatattcaatatttattataagaaattattttagcaattttaaaaagttgccatacaaagtcatctgtaattttacaagggtatttgaagcgcactccaaaaatttctgtttactttaggtttatactaatagactctgaattcatattactaaattaaaaaatttaattagtagagcaatacagattttctgttactacatccatattagagtttgcatggtatttcattcgtttgttttgttattcacattcctaatatcaatttctgagatagaaaacagtaagagacaggaagaaactcaaagtgatcattaatgcaaccccatgcctcacttccttacacttcttgcattaaactccaaactgcttctgcagttcaaacgtacgaacacaaatttcttcagaaattgaaacaacagattctttgaaagtgatccatgtttggttctgaactaggattttttctcctttttattattttctcctctgacatctcaaaaaaaaacattaattaaaacaagacagaaagattgtaaattttctcacattttatgtttatttattaactataacaagatgggtttttattatttgcttgtattacaaaaaaataaaatcatgtagtttctggattttcagtctgtgcagaagaggattctctcggtcaccttcggggcatcggccttaaattcggatggggagcaaatggtttgtttggacgtaggaatagtcataatcaaattagcaaacacgattttaggagttttgtgatgtaatagtacggaaaaaagaaacatgtattaatggggaaaatacgaaattttaagaggtcaggatgggtggtggtgtatagtaattgcaaagaaattaaggtcatttttttttggattgactcgagggtctttgttgatgatcgttccctttaataacgtattaataattcttcagtttcttttgaaatattaagattcttttcatctgcatttatttcaaatataaactaaatggagccttttttatcagacaaaaaaaaaaaactaaatgtgagctttatttaaaagactaactattgaatgggactatgggacaatgctaaacagtcttagtttataaatcataactttgtgataggatgcaaataaatcaaaacaaaatgtggcatctccatttaacacaagcggttatcagtgttaactagatctgtaagtaacattgcaaagtctcgttccaaggactggtccaagattattaaggattccaaagcaaaacaatttatggccttatttttaagcaaaaaaataaagatattttagttatgtggatatagtagtattttatttgttcttaaaattaaaatataaaatatatgtttaggctgttttggtgctcgggcctttgcagcttaacttcggctgaatcagaaaatggcgatcaatgcaaccatttaaatatctatatttccatctattcttatgaaacaataaacaattcgttttgattgaaaaaaaaaacaacaacaaacaattcgatgtactataagtttttcaagttaatttactaattaagaagatttttccatgacaatctacataccaaaaaaaagttactaattaacatatcctgcgtttaatttttggttataagaaacgtcgaagtgattaacatacagcctgaatttttcctatatgtttttgggagtatctaggtttatcttgttataataaaatagtttcaaaatctatcatttcataagctattggattggaattgtactttaaccatcttttcataaataacagaggctcagtctctgaattcttcatatgctgtggtacatttatacgtttgcttaggtatacaatatattttctttcaattttatcagaaaaatagtattggcgtcatggaggaaccctagatttcagtgggatgttcaaacggcaatcaattttgacatgtgttttacatattgggaccactacaagcgaatgaaaaccttaaaagctcaacaaagtacatccaactattttattttggaaaataattgtattttctttgtagccaggaaatttcacaaaataactaacgcatgatgaatcatgaatgaaaacataagttcatagttagagttggaatgcaacagtttaaaaatgagcatggggcacaatgtgaagttagcacttatagcacaaagtgcggagaagttgccactttcacttcccacaattatcttttgctttgttttttttaagcaattatggctcttcatgatttccttaatattttgataacaaatattcagatatgttctgttaattgggttcagatacacaaatcctactaatatatatctctccctcacaccacgcatatatgtttgagtgagattataatcagattagagctttgtatatatgaaaccattaaaataaattacacactaactagaatagacctcgactataaaatataatattttacagtgtgaaatgtattcatatgaatctcataaaaatacattttttcaaattaatcatatgattcactgacacttctaaatggtaggatatatacacgtatgtacgaaatatggatgtttaaacggatagtaactcggaaaaaaacttgtgagatctctcttctaatgttcagatattaatttttttagcgtcaactatgtatctttgcctcatagatatgttgtggatgttaggaccaattatttggaggtgggggagtgatggatgagtgatccataccgaatagtactgaagcgataaatggttgtattttttaaataagatggagttttaaaagttttctatttttgttttcatcttccttctggattcaatcttttgcttctcatgctacaatcaatttgtccctaaccaaaaatgtcaataaactgtacgatcacttcaattcaagtcttcaatgcactaatatatactacttagtttattatcttgaaagctgatattatgtacctcaattgagcatcccaacatttgaagtttgctttatataatcgtcatcttcagaaatgtttttaaaattatagttagttaattacattatatatatatatattatttttatttctaggttccgatacatatagtatatgggttgtcttatcatttatgatatacaattaacatatatataattgagtttaatacttagtaagtattatatctagataaacgcatttctttatctataagaatgtacataatattctatagcctatcattatattatatggtgcgagctatgcattaaatgaaaggtacataaagagggagcaagagaaatgggttataggaaagaggttgtaagtttgtaagctaaaattgcgctcattttttgcagtctcactaaatgctcacattagtaaatacaccaacatgccttctcttcaatgacctaatttcccttcacatgcaatttccccgattttcatttttatttttgttatcttcatctttgttttattattgaatcatttttttttaacaaatgaactaacgtgacttgatttaaaactatattatataattaaaataatagtatataaatccatacgtagcgcatacactaatctagttcctataaaaaaatgaagtaccaagtacatgctaagccgtgcgtaaaaaaacttatctttaaaccatatgtatgcttatcctcaaaaaagttttctttttttttggttacaaacttacaattcttcattcgatgagaaaccacatgttcttccgtgtattgtttaaattgatcgcaaccatgtacatttgtgaatttccaaaactcttgcatgattagaccatgtgagacaagccttcgttttggattggcctacataactcggccgagcggttattcacgcggtcggaaaatcaagtttgattgtacaatttgtacagcgaattggtcacatagatggtggtggatggtacacaacaccacggagagggccatcaagcgatattcttggtggttgccaatatatattacactcttgctcccatgattaaatgaaccatgcatgtaattgagaaaactttaaagtagtgatttatatgataatgtgcttacaagactcgatgggttctatagaatctatacgattttacgtgttctcatacagttaatacagtacaactatctcacccttttttgctgaatgtagaaaaattaaatatctgattagactctaatgtcgaaataaatataggtatataatttgcaaacattttgatatacaaagtttaaaaattatcatgcattacaaaatgtatattcttaaaaagttcacaaaagacatacaaagcatgcatttaagcttaagaagttgacaaaagatggagaaatggaaaattagttaattaagcccattgggaataagtgaagtgtatttgaaaagcctaagaatcagtgatcactgatctcacacgtgtataatgaacttttgaataaacttgtttatttgtatgcaaaataccaattttctaagtaagggagattagttttcgagaaacatcctcttatagaagtgagagtagcccaaagaaaatagaattcctaacaacattctctcaagtttgtttgtttgagattgtatattaaaaatgtcaaatgacataattaatatctaaggcttatacattattctaatactgtttggattaaacaaaactagtagctaaaaaataatgcattgggattagaatttagagggcgttgaggaatgagaatgtttgaagttactcttttctaatacttgggactagatacataaatagtgataaaactatttgaaactcttgctaggatccttggttaattacgtaattgtttatgtggctccaatatatcactaaattacgacaatatgcttaagttgtagcatgcataattacatataacctaaagaaatgtagaggatcaatgtttggagtacaataagacgatttagtcttctttttcactcgtgtgtcacttcatacatgtactgttttacttttctcattgtttattttttattgaatttgatccctaacttataaggtttatcatccatcttagttttggcaacgttgattcattatatttaggcattctcctttgttccataagacgagtgatggctttatcgaccacttggcttcttcaggagaccaaagttacacggaatttcatctcagacctattagaacagcgtgtctgtagctcttttaactgaagtcaaatgctcctgccaaagaaacacatgtcagaaataacgaacatatcagaagaacatgtcattgataatactttaactaacttatggaagattagtaggtcaatatgaacactgaaacaattgactgaagcagatcggatttctcactctgctatgtttttctcaaactgctgagaagtcaactaagtagacaaagatctaagaggcagcttcctactcatatctccaacaattgggcatttggtctagtggtatgattctcgctttgggtgcgagaggtcccgagttcgattctcggaatgccccgttgactttttaaacagtgtatgtttggtatgccaactaaattttgttactgacaatttttcctatggtgccagatttttaaagatcatgttctactcaacagttgaccagtccctaaaacatttcaccagcagtatattgatttccaatcagataactgagagagagagatctgctttcatacctttgctatcaggtcatatgattgagatttccaaccagataatatcagacacacattgaccatgacaaagcgctatgctgccagattctccaagaaggcaagaacgagctgcaggaaatgaaataaaagataatgcctaagttgacaaagttcagaaacaaacaaactaaagatactggtaacaatcaaacatttggtctagtggtatgattctcacttagcttgcaagaggtccacagtccagtcctcataaatcagaatgcctcattgaaattttgaatgaatgtgttcagtataagactagataattaaggttattctttgccgcctgatttctcacagttcattaccaaaacatgcatttcacttaaaattcactaagagtagcttagaaacaccatcaaagcagacattcttaattcttcttaccaaaaagaacaagtagctaaattttctacaaaggatatcataaaattgagaatacttgcaataatcacatgtagtcagattcaccaaaaatgattttaggcttattagcatgttgcaagttcaccgaaatgaaatatttttttgcaaatactacagaaggtctcacatattctttcagcgctgaaaatgcttaaaacgagttaaatcaatgacaggcatttgacataagatgacagatccaaaggcaacaacattcgctttagtgtttgaactgaactactcaacaacgggcatttggtctagtggtatgattctcgctttgggtgcgagaggtcccgagttcgattctcggaatgccccattgactttttgaaaagatatgttttgatcctagctgaagtttattatgtgaaaaaatttgttctcaagtaactgaatttaagaggtcacgtctaagtcaacaagcaaacatgacctaaaacttcgttcaaagtgataataaccttctttaaaattgaacatggtcccaaacctgtctttatgcctgatgatatggatttaccgcaaaagcatacaaaagaacagaggcaatcaaatctcaagatgattctaactttcatgtgagaggtcctaagttcaatcctcagaatcataaactattttataattctattatcttattcgaaaactcaaaaaaacaatataggaatactaatacataacttatagcgttaatcagatcctgagtaagagttacaagcctacaacaagtcaacaattcaatagacacaaaccttgaactcttataagttattaccaaagaaaaaaccttgaactctacagaagcaaattttactgatcagaatatttcacttcccaaacatccaaaggcagtaacctcggcttacattcagaaattatacattagctacgactttcaaaattgattattttgttaaaagtcaactacgaaaacaagatccaaattgtatactggtcatcagatccgatggcttagattactaaaatattctatcattaagacaagtaagggaactagatgcgacattgacttcacaagcttttcttttagcttcttaaactatatttctcaacaacagggcatttggtctagtggtatgattctcgctttgggtgcgagaggtcccgagttcgattctcggaatgcccccaggttttttgatattttgtgtgctaaaagcaagattagatttaaaaaaaaaacagtaaagtccaacttgatttttcacagaccatattcaacaactcaaacagcatggatttcccttaaatttcagcaaggtcaaataaccacagtgccttgttaagagtttcattatataagagtccaaagcaagcagagtgaagaagtaaacataccttttctttcgcatcagatgtattaatttgttccaccagaaaaaccggaaaacatcagaaagcagcacaagcactacccacctgctggcagatttttcaagaacgagctgcgacaataacaaaaagcttattagcgaaacatcaagggaaaatacagttctcttctagataggacatatatgcaatcgtgcgcttggctttctggtatgattcttgcttttggtgcaagagtttacctctcagaacctatgttattaaatccagaagtacgggagaaaaaatgtacatatgtggggttttaatacctgagtataatttaagaaaattgaacagtgacatttcccaagaatttttactgaacaagatctaaaaatcagaatgtttcacatcaaaatatacaaggccaaaaatatgtcagaactggatcaagtggcatgatatatggtatgcgcacttaagagacttgtatgatccaagtcaacttataaaacaagatccaaactgtaggccgacttagatgcttcaaagaaacaagcatctttgcataagcacatcaaccaaaacggactctatttcagatataagaaatttagattgtataaatcattcaagaaaggataaacccacaacagcacgtccttaattattttaactgagttaaatcagcaacagggcatttggtctagtggtatgattctcgcttagggtgcgagaggtcccgagttcaattctcggaatgcccccattcttttttaagtctcaggggcattcaggagacctacaacctcacacatctaagtaatacaggatgtggagagcatagagcatatcaggactctatgataagcaagaccatggtgacatccttacggtcactagtttaggcattttaacaaggaaaaatcaaattttcagacatgaaaataagactttcaagattgacttcatgatcaaagtaacagataacaatatgcaaagtttatccttatcatcagatccactagcttaggttcctataaccaacagccacctatcccgaaccaaatcaatcctatactagttcgtcagttgcaccggtggcttttcatgcacaataaagtcagagagcagaaattgattggtattaagagatccaaaggcaacaccattatctatagttttaaaactaaattacatcaacaacagggcatttggtctagtggtatgattctcgctttgggtgcgagaggtcccgagttcgattctcggaatgcccccactgactttttcaatagtctatgtaccgtatggcaataattttttttatggaaaagtcaaccttaggtgcataattttcaaagatcattcatcttcaactaaacatttgaccagttccaagaatttcaccagcagtaaattggaacatcatcccaagattcccaacgtacctttactttcaggtcaaatggttggggtttcaccaaaaaacacacttcttgcaaaacgggagctacccatgttttcaaggagctgtagcaaaaggaaaaaaattgataacacccaagttaacaaagttcagcaaacacacagaagataacagtaattgcatttcaaaaaccgttgctccaatgaattacatcaacaacagggcatttggtctagtggtatgattctcgctttgggtgcgagaggtcccgagttcgattctcggaatgccccatcaactaattttaattatttgttctaaaacccataaaacgtaaggtcaacagaatgcatagttttgtgctttaactagattctgagtatgagctacgacgactcaacagatgcacacttaaattctaaagaagcaaattatactgatcagaatgtttaacatttcaagtatacaaaggccataaactacacattttctatcagatctcagacattagacaaaacttaccacatccaatatttgattatgtggtaaaggtccactaggaaaaccacatccaaattgtatccttgtcatcagatcaactggcttagtttcacggaatcaaaaccaccttcctagatgcaaatcaatcagaaatggctctaaacctattacctgcatcagtggctcttgagacattagaacatgaaagagctaaacaaagcatctagaagatggatctacgcagcagccttccctttagctttttaacctaattacatcaagaactgggcatcaggtctagtaatatgcttctggcttatctttgtttcctaaataccatgggaatctcttaattcaggttacttcataacatttatggcatgaatatcatgtgcaggtgttcatataaacaaggtcagagtaatttaatatgttcatataatcagtgcaaatggccaactgaaacaaaaggtaacaaggtatcttgccttctgattcaagccttaccaaacaacttcaacaatctaaccaatataccatcagagtatttccagccactaaaattgtgaaccacaaattcattttccaatggtcattccctggattctcagttgtgaaacagatcccacagatcagatctagggaaattccattaagactaaaaaattcatcacagaaaagtcaactacaggagctagatctgacaatgtcttgatatgtttttctttatagcatctataactcaagtattcagcaccagggcatttggtctagtggtatgattctcgcttcgggtgcgaggggtcccgagttcgattctcggaatgcccccgatttgtttgactttttttttgcattttgtgatagaaagcaagctcagcaggatgataagtatatttatacttgactttgcacaaccactttcaacaaatttaaatatctgaaatgtcaaatttgtgtgatcatgcatatcacctaaattgcagtaaggtcaaattatcacaacgcattgttaagtttccactattaaaatttcaaagtcaacaaatagaacaagatctgaaatatacctttgctcttgcatcagatgaattagataacttaaatctgttgatttccgataccagagtcatccaaaaagcatgctgaaagactttccaagaatgagctgcaccaaaaagaagagggtcgttatcaaacttccagctaaagatcaacagaaactatagctctctttgaccataagatagacgagcaaacaaatgctttaacagaaatcactttttatttgggctgttgatatggcagcatggctctcactttgggtgtgagagtctatctaacaaacataatgtttttgatcagtccataacttcgtcagtcgaacagcgagaaatcaaattttagacatggatctgatggcatgataccacatccatgcatataagagattcttatgatttagtttttatcagatgaactaaaaacaagatccatactgtacccttagattcagatgcgttggcttaaattatcataaccaacctgaaaggattctaatcatcacctacaatagtaaagcttcagcaaattgagggttcaaaccagcatttctaagaaatgatgaaatcttagcagcatgcccttaggcgttttaactgagttaaatcagcaacagggcatttggtctagtggtatgattctcgcttagggtgcgagaggtcccgagttcaattctcggaatgccccattgagtttttttaaaagaacgtgttctgtatacgagctaataattaaggtaatgattacatgtcttttgaccaagaactgattaacatgcatttcacttaaaattcatcaagaacagattaaagaaaatgccctgtttgatagtgaacacttacaattattgtgtgttaacaaaatgataaggagagattaaatttcagacacaagacatgaaatgagacactcatattgactaaatgataagtaaccaatacaaaaagatgcaaagtgaatcgttttcttaagatccgcacgcttaggtttctagaaccaaaaaccaaatcaatcctgaaatggttctagttccacctattgcaaacggcccttaagtgtttaatctgaattatcaacagttgggcatttggtctagtggtatgattctcgctttgggtgcgagaggtcccgagttcgattctcggaatgccccgttgactttttaacagtgtatttactgagtgcctattgatttatattagagactttcctgtcttttggtgccaaattttcaaaatcacgttttagacaacatttccctaatttttctccagctgtatattaaaaacatcaccacaacataccttgtctttcagcacaaacgattgagatatgcacaaacacgatcatcttgatgatattccaactagataacgcaagcagtatgctgcaggaaagagaaacaagtaagcgcctaactaataaaactccagaaaatatagacccacctatggggacaaacagtctcttaaatgcatttaatgaattacaacaaatgaacatttggtctggtgtatgatcccctatgggaaagagaggtccagagcttaattcttaaaaagccctcaaaactaatatatcctttaattttgcttcatatgttctgagggtagttctttttatcagaaagtcaagtaaattgtatggtacacatatcatgtgcaaatgttcatagaaaacagatcagaaatgaattaaactaatggagtggtttcacatgatcagtgcaaacggccaactgaagataagacacaagagcttccacaactggaccagtatatttccagagtatatctggctacaaaattgcgattgagtaattcactttccaatgaaaaatgaaaacagtcattgccttaagactctcaattgtgaaacagatactgcagatcagacttagaaaatcctctttaagtctaaaatatttcatcactaaaagtcaactaagggaactaaacgacaacgacttgatctgtttttctttagcgtttttagcttaactgctcgaacagtagggcatttggtctagcagtatgaacttagcttaggaatgcctccaggatcggttctaaatatgctatatagtcacctttttaaaagtatttgctctaagtgacggggaaggattggattctagatctgtcaatatatgcttgattatcatatatatgagcttcataaaaactcccatccaagaataataaaaccagagaagtgttattctacatttgaacctaatttctcaacaaccaggtagttggtcaaccgagaagtcccaggtttgattcctggatacccccaccttacataacatttctttaagattaagaactggcagggtagttttagtccggaaaagatgaagagttggttatgaattagaaccaactaaacccaaagccaagtaaaaaccagagatatgatttatgatactattatgtaagaatataatctaaagccaggtaaaaaaaaacaccaacaatggtttcagccagattaacttagtagcgtatcaaagggaagctttttctaaacttgataacgagacaaagcgtatcacaactgcacaagttcctacattagaaaatgagcaatccaccatttctacaagatatttgtggtaggatatactgataaatagaaatacctcagtgctcacaattgaaaatactgaaggaatgacttggaaacaaagagcagacaaaaagcaacgttacaataatcagtaatacagactgacctgggacatgacctagtaatcttccattttcacaagattcatgtaaatttgccagcggcttcagccatccatataaacgagtagcctggttctgcatttactggtacaggaaatcagtattatactttattgtctttttgttaaacttatagtacaagtggacgtcaggataacacaattgagcaactgcctaccattttggagtacttcaagttaggtttctgttcaatgaaagcaggtggtcgttgataaaccactgttgcagctctaatcaagattcttgcagttaagccccatataacataatcactatctcctgttttgtaatcaaagaagtggaccaaatgcttttctcccatccaatcaaactcctcggatctccggttctcatcctgcgtaagatatatttcaaccagcgatgtttcagagtaaataaacacagtaactataaagcgtccttgaagaaaagagacgagaggaaccttcagaaacatttcaaagggtgcatcaagcacggcttccacttctgcaggatttggtgttggattgaatgcttttctgtcccataatattcctaccacaggaattactctaagcagatgctgcattggaaaatgaagcacagataagcaaaacacttcgtaaaagctaaagacagctttgtatacggcagaaacaatttggcatagagcctaaaccaacaataaaaaaggatattatggcttcagccactactgaaaattattaaggattttccagatagagagtcactgtagttaccattactctgctcctaggatacgagaaaattgtaataaaactacgaacaacggtttaaaatcagtgaatggaaacccctaagagaaccagtggtcgaatattgtctcgacacttcaaaacacaaatccgcctaacaatcaaatgtaactctgtggcctcacaaaacgcagctcccagatctattgatatgaacatgcattccttttaaaatgagacaatgagcactttttgatacctgagatagaaatggttcgaggaaagcaacaacatcaacaagcgaagggtctaatccaatctcttcctctgcctctctagttgcagtaatcccatcatccttatcatgctcttctgctttaccacctggcaaagaaacttctcctgcaacaattttgttaagggtttgaactaatacataaatagcttcaaagacgagaactttaaatctttcgctcatattggaatgatttgtgcttgcaatgataaatttcaaaattgttccaaagatgttcatcatcagatttatatgagactaagcaaaccaaactttcgaaaagcaattacaaacctgagtgagtagacaatgtggaagacctcttagtaagaatcacacgcaaatcaccatcgtctccttcgaagagacatatcaagacagcagctttcttcggtctgaacctcaccggagccatagattcctgaaacccaacgtgggttatcgatttcctggtgctttccttgtacgcaagcagctcttccctctcgtcgaaggatgacgaaagcggcggcttgtatacacgcagctgctgcgccaaggctaagagtctggaagatccaaaattgaagcttttcgccgttggcgacgcggctgatgctcccgacttcatggaattgcagtgaattacaacagttgtccgctagccaaggctcgcttgaaaggcagaccaatggaacttttggcaatatgacacttaaaaaaaaaagctttttgccctaagttaggttgaggttttggttgataccgtcctgccgagggacggtaaagaaatagtggtacggagaaaaaggtccgtaccaccattttctcgtaatattaaaaaatatgttctactttgtgatactaatcggcaattggattgaaagtggttcaaaagtcaaaacttgagttgcatagcctagaaaaacttacaatgaaactacactaatgtactccaaattataaattgataggaaagaaacaagatcaaaacttagggtaggcatgtcaatcggattaatgtcaatcggattaatccgatcatcgtctaagactcgaatcttttggggatggacttttatagaaaacgatagaattttgtttggggttactataagagacaaacagtagcatgtattaaaacaaacgaaaaatcacaaaggtcgttgcctacataacaaatacatgtatttacatcacaccagagacagaacatagaccaaataaatataccctcaaatcttcaagtgtacgtgtatactctttagatgcaaacaaagtttaacttcacttcaagcacctggaaatgacaatctccgcggtttcactgtgtttctagctccaggaaacggagttttggctggaactgatgataatgacactgttctctttgctggtgaatttgagtctgtctttgagctctttggtttcttaggagtcactgaatatcttacttcccaaggccgagcagatatccaacgctctttccagctccaaccccaattagtgtttcctagctcataacttcccaaccactgagtcttaccatcagctttccactgttaaaaaggtcaaggattaaaacttttcttctcatatcaaaagcagcaaacaagaaagaaatggcttttttattctatacctgatgagagaaagcatatgccaaggctctttctcgcttaatcgtcgcttcttccctttgaagtatcctctccaagatttcatcttttgtctctgacccaccattccattcaacctgcaattatatcaaactcagcatgagctttaaacatctcaagtaacagttttagaaagtaaaaacatgtttcagtctttcacaaaaatcttacctcaacatcatgaagctttgcctcaagctt

SEQ ID NO: 326 - DNA, 82484 bp, Arabidopsis thaliana
aagcttaagaagttgacaaaagatggagaaatggaaaattagttaattaagcccattgggaataagtgaagtgtatttgaaaagcctaagaatcagtgatcactgatctcacacgtgtataatgaacttttgaataaacttgtttatttgtatgcaaaataccaattttctaagtaagggagattagttttcgagaaacatcctcttatagaagtgagagtagcccaaagaaaatagaattcctaacaacattctctcaagtttgtttgtttgagattgtatattaaaaatgtcaaatgacataattaatatctaaggcttatacattattctaatactgtttggattaaacaaaactagtagctaaaaaataatgcattgggattagaatttagagggcgttgaggaatgagaatgtttgaagttactcttttctaatacttgggactagatacataaatagtgataaaactatttgaaactcttgctaggatccttggttaattacgtaattgtttatgtggctccaatatatcactaaattacgacaatatgcttaagttgtagcatgcataattacatataacctaaagaaatgtagaggatcaatgtttggagtacaataagacgatttagtcttctttttcactcgtgtgtcacttcatacatgtactgttttacttttctcattgtttattttttattgaatttgatccctaacttataaggtttatcatccatcttagttttggcaacgttgattcattatatttaggcattctcctttgttccataagacgagtgatggctttatcgaccacttggcttcttcaggagaccaaagttacacggaatttcatctcagacctattagaacagcgtgtctgtagctcttttaactgaagtcaaatgctcctgccaaagaaacacatgtcagaaataacgaacatatcagaagaacatgtcattgataatactttaactaacttatggaagattagtaggtcaatatgaacactgaaacaattgactgaagcagatcggatttctcactctgctatgtttttctcaaactgctgagaagtcaactaagtagacaaagatctaagaggcagcttcctactcatatctccaacaattgggcatttggtctagtggtatgattctcgctttgggtgcgagaggtcccgagttcgattctcggaatgccccgttgactttttaaacagtgtatgtttggtatgccaactaaattttgttactgacaatttttcctatggtgccagatttttaaagatcatgttctactcaacagttgaccagtccctaaaacatttcaccagcagtatattgatttccaatcagataactgagagagagagatctgctttcatacctttgctatcaggtcatatgattgagatttccaaccagataatatcagacacacattgaccatgacaaagcgctatgctgccagattctccaagaaggcaagaacgagctgcaggaaatgaaataaaagataatgcctaagttgacaaagttcagaaacaaacaaactaaagatactggtaacaatcaaacatttggtctagtggtatgattctcacttagcttgcaagaggtccacagtccagtcctcataaatcagaatgcctcattgaaattttgaatgaatgtgttcagtataagactagataattaaggttattctttgccgcctgatttctcacagttcattaccaaaacatgcatttcacttaaaattcactaagagtagcttagaaacaccatcaaagcagacattcttaattcttcttaccaaaaagaacaagtagctaaattttctacaaaggatatcataaaattgagaatacttgcaataatcacatgtagtcagattcaccaaaaatgattttaggcttattagcatgttgcaagttcaccgaaatgaaatatttttttgcaaatactacagaaggtctcacatattctttcagcgctgaaaatgcttaaaacgagttaaatcaatgacaggcatttgacataagatgacagatccaaaggcaacaacattcgctttagtgtttgaactgaactactcaacaacgggcatttggtctagtggtatgattctcgctttgggtgcgagaggtcccgagttcgattctcggaatgccccattgactttttgaaaagatatgttttgatcctagctgaagtttattatgtgaaaaaatttgttctcaagtaactgaatttaagaggtcacgtctaagtcaacaagcaaacatgacctaaaacttcgttcaaagtgataataaccttctttaaaattgaacatggtcccaaacctgtctttatgcctgatgatatggatttaccgcaaaagcatacaaaagaacagaggcaatcaaatctcaagatgattctaactttcatgtgagaggtcctaagttcaatcctcagaatcataaactattttataattctattatcttattcgaaaactcaaaaaaacaatataggaatactaatacataacttatagcgttaatcagatcctgagtaagagttacaagcctacaacaagtcaacaattcaatagacacaaaccttgaactcttataagttattaccaaagaaaaaaccttgaactctacagaagcaaattttactgatcagaatatttcacttcccaaacatccaaaggcagtaacctcggcttacattcagaaattatacattagctacgactttcaaaattgattattttgttaaaagtcaactacgaaaacaagatccaaattgtatactggtcatcagatccgatggcttagattactaaaatattctatcattaagacaagtaagggaactagatgcgacattgacttcacaagcttttcttttagcttcttaaactatatttctcaacaacagggcatttggtctagtggtatgattctcgctttgggtgcgagaggtcccgagttcgattctcggaatgcccccaggttttttgatattttgtgtgctaaaagcaagattagatttaaaaaaaaaacagtaaagtccaacttgatttttcacagaccatattcaacaactcaaacagcatggatttcccttaaatttcagcaaggtcaaataaccacagtgccttgttaagagtttcattatataagagtccaaagcaagcagagtgaagaagtaaacataccttttctttcgcatcagatgtattaatttgttccaccagaaaaaccggaaaacatcagaaagcagcacaagcactacccacctgctggcagatttttcaagaacgagctgcgacaataacaaaaagcttattagcgaaacatcaagggaaaatacagttctcttctagataggacatatatgcaatcgtgcgcttggctttctggtatgattcttgcttttggtgcaagagtttacctctcagaacctatgttattaaatccagaagtacgggagaaaaaatgtacatatgtggggttttaatacctgagtataatttaagaaaattgaacagtgacatttcccaagaatttttactgaacaagatctaaaaatcagaatgtttcacatcaaaatatacaaggccaaaaatatgtcagaactggatcaagtggcatgatatatggtatgcgcacttaagagacttgtatgatccaagtcaacttataaaacaagatccaaactgtaggccgacttagatgcttcaaagaaacaagcatctttgcataagcacatcaaccaaaacggactctatttcagatataagaaatttagattgtataaatcattcaagaaaggataaacccacaacagcacgtccttaattattttaactgagttaaatcagcaacagggcatttggtctagtggtatgattctcgcttagggtgcgagaggtcccgagttcaattctcggaatgcccccattcttttttaagtctcaggggcattcaggagacctacaacctcacacatctaagtaatacaggatgtggagagcatagagcatatcaggactctatgataagcaagaccatggtgacatccttacggtcactagtttaggcattttaacaaggaaaaatcaaattttcagacatgaaaataagactttcaagattgacttcatgatcaaagtaacagataacaatatgcaaagtttatccttatcatcagatccactagcttaggttcctataaccaacagccacctatcccgaaccaaatcaatcctatactagttcgtcagttgcaccggtggcttttcatgcacaataaagtcagagagcagaaattgattggtattaagagatccaaaggcaacaccattatctatagttttaaaactaaattacatcaacaacagggcatttggtctagtggtatgattctcgctttgggtgcgagaggtcccgagttcgattctcggaatgcccccactgactttttcaatagtctatgtaccgtatggcaataattttttttatggaaaagtcaaccttaggtgcataattttcaaagatcattcatcttcaactaaacatttgaccagttccaagaatttcaccagcagtaaattggaacatcatcccaagattcccaacgtacctttactttcaggtcaaatggttggggtttcaccaaaaaacacacttcttgcaaaacgggagctacccatgttttcaaggagctgtagcaaaaggaaaaaaattgataacacccaagttaacaaagttcagcaaacacacagaagataacagtaattgcatttcaaaaaccgttgctccaatgaattacatcaacaacagggcatttggtctagtggtatgattctcgctttgggtgcgagaggtcccgagttcgattctcggaatgccccatcaactaattttaattatttgttctaaaacccataaaacgtaaggtcaacagaatgcatagttttgtgctttaactagattctgagtatgagctacgacgactcaacagatgcacacttaaattctaaagaagcaaattatactgatcagaatgtttaacatttcaagtatacaaaggccataaactacacattttctatcagatctcagacattagacaaaacttaccacatccaatatttgattatgtggtaaaggtccactaggaaaaccacatccaaattgtatccttgtcatcagatcaactggcttagtttcacggaatcaaaaccaccttcctagatgcaaatcaatcagaaatggctctaaacctattacctgcatcagtggctcttgagacattagaacatgaaagagctaaacaaagcatctagaagatggatctacgcagcagccttccctttagctttttaacctaattacatcaagaactgggcatcaggtctagtaatatgcttctggcttatctttgtttcctaaataccatgggaatctcttaattcaggttacttcataacatttatggcatgaatatcatgtgcaggtgttcatataaacaaggtcagagtaatttaatatgttcatataatcagtgcaaatggccaactgaaacaaaaggtaacaaggtatcttgccttctgattcaagccttaccaaacaacttcaacaatctaaccaatataccatcagagtatttccagccactaaaattgtgaaccacaaattcattttccaatggtcattccctggattctcagttgtgaaacagatcccacagatcagatctagggaaattccattaagactaaaaaattcatcacagaaaagtcaactacaggagctagatctgacaatgtcttgatatgtttttctttatagcatctataactcaagtattcagcaccagggcatttggtctagtggtatgattctcgcttcgggtgcgaggggtcccgagttcgattctcggaatgcccccgatttgtttgactttttttttgcattttgtgatagaaagcaagctcagcaggatgataagtatatttatacttgactttgcacaaccactttcaacaaatttaaatatctgaaatgtcaaatttgtgtgatcatgcatatcacctaaattgcagtaaggtcaaattatcacaacgcattgttaagtttccactattaaaatttcaaagtcaacaaatagaacaagatctgaaatatacctttgctcttgcatcagatgaattagataacttaaatctgttgatttccgataccagagtcatccaaaaagcatgctgaaagactttccaagaatgagctgcaccaaaaagaagagggtcgttatcaaacttccagctaaagatcaacagaaactatagctctctttgaccataagatagacgagcaaacaaatgctttaacagaaatcactttttatttgggctgttgatatggcagcatggctctcactttgggtgtgagagtctatctaacaaacataatgtttttgatcagtccataacttcgtcagtcgaacagcgagaaatcaaattttagacatggatctgatggcatgataccacatccatgcatataagagattcttatgatttagtttttatcagatgaactaaaaacaagatccatactgtacccttagattcagatgcgttggcttaaattatcataaccaacctgaaaggattctaatcatcacctacaatagtaaagcttcagcaaattgagggttcaaaccagcatttctaagaaatgatgaaatcttagcagcatgcccttaggcgttttaactgagttaaatcagcaacagggcatttggtctagtggtatgattctcgcttagggtgcgagaggtcccgagttcaattctcggaatgccccattgagtttttttaaaagaacgtgttctgtatacgagctaataattaaggtaatgattacatgtcttttgaccaagaactgattaacatgcatttcacttaaaattcatcaagaacagattaaagaaaatgccctgtttgatagtgaacacttacaattattgtgtgttaacaaaatgataaggagagattaaatttcagacacaagacatgaaatgagacactcatattgactaaatgataagtaaccaatacaaaaagatgcaaagtgaatcgttttcttaagatccgcacgcttaggtttctagaaccaaaaaccaaatcaatcctgaaatggttctagttccacctattgcaaacggcccttaagtgtttaatctgaattatcaacagttgggcatttggtctagtggtatgattctcgctttgggtgcgagaggtcccgagttcgattctcggaatgccccgttgactttttaacagtgtatttactgagtgcctattgatttatattagagactttcctgtcttttggtgccaaattttcaaaatcacgttttagacaacatttccctaatttttctccagctgtatattaaaaacatcaccacaacataccttgtctttcagcacaaacgattgagatatgcacaaacacgatcatcttgatgatattccaactagataacgcaagcagtatgctgcaggaaagagaaacaagtaagcgcctaactaataaaactccagaaaatatagacccacctatggggacaaacagtctcttaaatgcatttaatgaattacaacaaatgaacatttggtctggtgtatgatcccctatgggaaagagaggtccagagcttaattcttaaaaagccctcaaaactaatatatcctttaattttgcttcatatgttctgagggtagttctttttatcagaaagtcaagtaaattgtatggtacacatatcatgtgcaaatgttcatagaaaacagatcagaaatgaattaaactaatggagtggtttcacatgatcagtgcaaacggccaactgaagataagacacaagagcttccacaactggaccagtatatttccagagtatatctggctacaaaattgcgattgagtaattcactttccaatgaaaaatgaaaacagtcattgccttaagactctcaattgtgaaacagatactgcagatcagacttagaaaatcctctttaagtctaaaatatttcatcactaaaagtcaactaagggaactaaacgacaacgacttgatctgtttttctttagcgtttttagcttaactgctcgaacagtagggcatttggtctagcagtatgaacttagcttaggaatgcctccaggatcggttctaaatatgctatatagtcacctttttaaaagtatttgctctaagtgacggggaaggattggattctagatctgtcaatatatgcttgattatcatatatatgagcttcataaaaactcccatccaagaataataaaaccagagaagtgttattctacatttgaacctaatttctcaacaaccaggtagttggtcaaccgagaagtcccaggtttgattcctggatacccccaccttacataacatttctttaagattaagaactggcagggtagttttagtccggaaaagatgaagagttggttatgaattagaaccaactaaacccaaagccaagtaaaaaccagagatatgatttatgatactattatgtaagaatataatctaaagccaggtaaaaaaaaacaccaacaatggtttcagccagattaacttagtagcgtatcaaagggaagctttttctaaacttgataacgagacaaagcgtatcacaactgcacaagttcctacattagaaaatgagcaatccaccatttctacaagatatttgtggtaggatatactgataaatagaaatacctcagtgctcacaattgaaaatactgaaggaatgacttggaaacaaagagcagacaaaaagcaacgttacaataatcagtaatacagactgacctgggacatgacctagtaatcttccattttcacaagattcatgtaaatttgccagcggcttcagccatccatataaacgagtagcctggttctgcatttactggtacaggaaatcagtattatactttattgtctttttgttaaacttatagtacaagtggacgtcaggataacacaattgagcaactgcctaccattttggagtacttcaagttaggtttctgttcaatgaaagcaggtggtcgttgataaaccactgttgcagctctaatcaagattcttgcagttaagccccatataacataatcactatctcctgttttgtaatcaaagaagtggaccaaatgcttttctcccatccaatcaaactcctcggatctccggttctcatcctgcgtaagatatatttcaaccagcgatgtttcagagtaaataaacacagtaactataaagcgtccttgaagaaaagagacgagaggaaccttcagaaacatttcaaagggtgcatcaagcacggcttccacttctgcaggatttggtgttggattgaatgcttttctgtcccataatattcctaccacaggaattactctaagcagatgctgcattggaaaatgaagcacagataagcaaaacacttcgtaaaagctaaagacagctttgtatacggcagaaacaatttggcatagagcctaaaccaacaataaaaaaggatattatggcttcagccactactgaaaattattaaggattttccagatagagagtcactgtagttaccattactctgctcctaggatacgagaaaattgtaataaaactacgaacaacggtttaaaatcagtgaatggaaacccctaagagaaccagtggtcgaatattgtctcgacacttcaaaacacaaatccgcctaacaatcaaatgtaactctgtggcctcacaaaacgcagctcccagatctattgatatgaacatgcattccttttaaaatgagacaatgagcactttttgatacctgagatagaaatggttcgaggaaagcaacaacatcaacaagcgaagggtctaatccaatctcttcctctgcctctctagttgcagtaatcccatcatccttatcatgctcttctgctttaccacctggcaaagaaacttctcctgcaacaattttgttaagggtttgaactaatacataaatagcttcaaagacgagaactttaaatctttcgctcatattggaatgatttgtgcttgcaatgataaatttcaaaattgttccaaagatgttcatcatcagatttatatgagactaagcaaaccaaactttcgaaaagcaattacaaacctgagtgagtagacaatgtggaagacctcttagtaagaatcacacgcaaatcaccatcgtctccttcgaagagacatatcaagacagcagctttcttcggtctgaacctcaccggagccatagattcctgaaacccaacgtgggttatcgatttcctggtgctttccttgtacgcaagcagctcttccctctcgtcgaaggatgacgaaagcggcggcttgtatacacgcagctgctgcgccaaggctaagagtctggaagatccaaaattgaagcttttcgccgttggcgacgcggctgatgctcccgacttcatggaattgcagtgaattacaacagttgtccgctagccaaggctcgcttgaaaggcagaccaatggaacttttggcaatatgacacttaaaaaaaaaagctttttgccctaagttaggttgaggttttggttgataccgtcctgccgagggacggtaaagaaatagtggtacggagaaaaaggtccgtaccaccattttctcgtaatattaaaaaatatgttctactttgtgatactaatcggcaattggattgaaagtggttcaaaagtcaaaacttgagttgcatagcctagaaaaacttacaatgaaactacactaatgtactccaaattataaattgataggaaagaaacaagatcaaaacttagggtaggcatgtcaatcggattaatgtcaatcggattaatccgatcatcgtctaagactcgaatcttttggggatggacttttatagaaaacgatagaattttgtttggggttactataagagacaaacagtagcatgtattaaaacaaacgaaaaatcacaaaggtcgttgcctacataacaaatacatgtatttacatcacaccagagacagaacatagaccaaataaatataccctcaaatcttcaagtgtacgtgtatactctttagatgcaaacaaagtttaacttcacttcaagcacctggaaatgacaatctccgcggtttcactgtgtttctagctccaggaaacggagttttggctggaactgatgataatgacactgttctctttgctggtgaatttgagtctgtctttgagctctttggtttcttaggagtcactgaatatcttacttcccaaggccgagcagatatccaacgctctttccagctccaaccccaattagtgtttcctagctcataacttcccaaccactgagtcttaccatcagctttccactgttaaaaaggtcaaggattaaaacttttcttctcatatcaaaagcagcaaacaagaaagaaatggcttttttattctatacctgatgagagaaagcatatgccaaggctctttctcgcttaatcgtcgcttcttccctttgaagtatcctctccaagatttcatcttttgtctctgacccaccattccattcaacctgcaattatatcaaactcagcatgagctttaaacatctcaagtaacagttttagaaagtaaaaacatgtttcagtctttcacaaaaatcttacctcaacatcatgaagctttgcctcaagcttttgctgatgctctaatcttttattcttcagtcgccattcggttaccatgcaaactcggcgagcctttatctctgactgtattttactccatgagtgaagatacctcaatgtgaccacagcttggttcttcacagattgtttctcagttgataactttgctcttgcaattccttttagacgccgtaagctttttctagcctgtccacaacacaagatccctttaaacttccaatgtaaaaaatgtaaaatcatgcaaatgaatttggaaaacaaaaactcaaagaaccttataggctttaaaagcagtctgaatccgagtagcagcccaatcctcactacgagtaactagtgatgtacccttcttcttggaacctttttttggtttcacagcactagtttttttctgtcacagagaaacacttttgtaaaacacaattcagcatttggttaattgccaatgtaatgtaacacataccttttcagttccttgtttactcttcttcaatctaattattgccttaatcaaattcccagaacccatcttagagtctatcaattgtcaccaaaacaccttgtatatatgcaaatgctgctctaaccctgagatttgaagccaaaatactctggttaataaaaaaaacagctaatgtttaaggatcaactactccacagaaactcttttgtttaatatacaaaaattgaatgtgaatacaagctaatgattattggattggttctttgtactcaacgactcaaaacacaagcaaaatcaacaaaatcaagtacccaattgaaaagtgtattcaattagagagcaaaccataaatacttgagtgaaaacaaacccaatgctatgaaaatcgaaaaaggttcaaactttactaaaagaaatgacattaaccacaaccactaaattgtctattctccagatccaatctacaaccattgaaacacagcaaaaagaagttctagttttcaacgaagaaacaaaagatagatacaaaaacctgagttcaggaccaatgaaagaagctcgtcaaagaactgaaaaactggtaaaggccgcgaagaacactgaagcagagagacagaaaaacagaacaagagatttggtgactgaatgaatgattaaagggtttttgcttgctctgtgtctctgtagtgaggaagaagtaaagactttaaaagggacatcattacagcgtcgtgactcgtggagagactggaaatattaggctgtaatccgcatttttatttttattttatttgtactagtaatcagtaattgttaaatccaaatgttacaccaacagtttaatgttaaaaaaatatacataagatttgtcagattctactctcttttttcatcacgttgtatatcgtctttttgaagatacgaagagtttgtaattattatggaatatttttactttccttataagatgtcataattatataacacccatctgcattttcgtgactcgtatatactcctctaaatttagaagttgaaaagtagtttgaacaaaaaaaaagaagaagttggaaagtagtgaaaaattaattagaagatggaaaacttaaaccactttggtttatggtatttttcctttaaatatcaactatgacagcttaaccatctgtgtatgtttaaactttaaagttatgatttgatagtttgaagtttgaactttcaagccaccaccgattgataaatgtgttaagaattatgatggttttgatgactgtctatgaattactaattgagattgactatatatcaactaaactatttaaatttgttaaaattcttaccaatcaataaatatttttaaatcactatcccttaccgttcaactatcttttaatttttcaaattataccatttttctaaaccacaaacactcctatgatcatatcattaagtaagattctaattaaattaaaagtgggatgttgtagtccaagcggatgtttctaaattttgtgtgtgttaattagctatgtattatgtcattttcactgtttaacttctattgataacatagctaattagctataaagtgaaacaacaatatgtatggttgtttatgtagtagctatatatataatcactttaaaaaaacataacacaaatccaaatgaaattattagtatcattttattacaaaataatgaagtacatgaatttgaaatatttttggctttttcataaaagatagtatttatcttgatatgagttagttgacgtatttggatattagtgattattatacttcttatcaaatggtttctcgaagtggttggtctataatgatgagcaaaaaagcaatggttagcagaatcatttgacttcggccgagggcctgagggggtccgaagtttccaaaatcgatattgcacctaccatacactcctttttgatccatctaccacagacaagaaacaaaattaatgaatcttttaaagatgagattattaaatgtcccaatagttaagatcaaatttatgtggattcagcagctcgagccagccaccacaactgtggtttgtacctaattctactgaataatcacagtaaatgggaagatctcgaaagctggttgacattggttttgagtgtaggtctttgcatacttaatcaatgagagcatctccattgggagtatttcaatgagatacctaataaaaaaaataataattaaaaaaaaaaaagtaagagagaagaaagaaaaagtaagagagaaggagaattgaatttctcgcaggagaaactttgagaaactattctcatctaaattggacagctgtcatcgtattattagttcaagtattaaataataattaatatttctgttttgattaaaatatatatatatatatattttttttgaaaaactttccttacttttactgatggagatgctctgagtagtagtatattttaaagaatatagtaatatattaaatcatttttatcactgtaaaaaatatatcaaaaactagtatttgtaaaaggaaataagagtatatatattgttatacataatttgtttcttttctatcatatcgctcaagattttagtcgactacatatacaaaacaattcactatgaggaataacttacaaatttcatctccaatttctttagctagaaatactaaccacttcaagatataaacaaaaacgcaataaatatatcattttctatctataaggttaaagttgggagattaaaaagtataaattttgatgattattttcgatgattacagtatgtaaaaagtggtccaaagtgtcccaataatatttcacataacaattggtccaaaatgttcgtaaggctctaattggcaaatatgtgaccaaagataattgatgaagtcaaagtgttgttttagacttaagataataagatggttatatttttatcatcaactttaaaaaaatatgaaaagaaactccataaaaacaaaacgcaaagacatttgagaatgaaaaatccaagaggttgacaactgttaatttgactttattactctagtttcatgctttttcaaaaattataaccatatataaaatcaaagtacgtagaacaacaaactaacctaaaagaaatttcctcaccagtataaatatagggttcctacaaaattttgcagctattaatgattttgtttaatctttatgtcttttcagatatgtagacagttaatccaatgcgaccatgaccccgttcatatccttatccatttagcattttttttccttcaacttctatgtttgttaatttgttttatatacaaaacttcacagaaccccacaagcagcaaactaaaccaataaactaatcccatttgtggtttaccgattcaaatcaaccatattctttaattcaactgataatatcataatgttcccaagttcattatagtggtgatcgtatttcaactcttaatccaaacatattcaaagggaatgtcaactctcaatgatctatatataaaaacggtagatatgttattagattttctatctttgttaactttcgagagccatttttgtgtgtttttatagatcaaagagatgggtttcaatgatccttcattaaacacaatcatcctttggttcgcctccgtaacgtctctcgtgactatctcagtcatcttcgcccttctcattatttgtttactcaaacgccgtaggtttgatgtatcaccggaaaccgagaacgagaaccaaggaagaagagagccacggtgccaagggcttagcgcttccgtgattgctgcctttcccaccttttcttacaaaccggataataatgatcctgagagcaacaatcaggagatcgagtgtccggtttgcttaggattaatccccaagaatgttgtaattaaggttttaccaaattgtatgcacatgtttgatgaggaatgtatcggtaagtggcttgaatcacacgcaacttgtcctgtgtgtcgtagattggctgagccaatgactagcaatggagataaagtcttagaaagaatagtatagtgattttttatatatgtcaaattatatgatttttttctttaattttgctaattattgtaatattttttcttattgatgtgaaatgtacaaaggatataacttttgtttttttaaggatatataacttaaaatgcagttatgtcattttacttgaattgagatgctggttatgaaaagagaaagtcgactttttatttttagatcgagaagttatgcatggttcactgcatccttccgtttctagttcaactttcttagacggaagactagaacacactagttgtcttcgcaagtatatggtcatattgagttttgaatatcaatcaagtttgttattaaacaatgtttggcgttaattaataatgcattcttcatcatcatccatatactataatgtcgaaaagtgcaatgatggtcacctccttactttacatactacaagaaaagagactaattcttacggtacgtagaatactattatatacatatagtcaaatcttcaaaagtctatgcaaaagtaatattagttgttgatcctaggaggtggcttataagactactcttgcggggagttaatctctttaaagtcaagacaaaagcttacactccttttgaccaaaaaaaaaaaaaaagcttacactccttcgtgatttacggttgaagttcgagatccaaacttaaaggaccaataggaagcttatgtaccgggcggagtctccaaaacacgaagtagcaactcacacatgtgtcaggcgtgtaaacttgtcttgtagtttaggttcttgtttaaaagagatcgatggagggaagtgggaatacacttgtcatttggaaataagggaaaagagaaagtttgtattttgttagcgagaatgagctaaaactataatctttgagaagatttggtaaaacctctcaagagatgtggttttctctctaagtttaaaacttattaaatcgccttaacattcattctattttatgtttttcatatttactttcttctgttgcttgatatttctgttttgttcttgttcttgatatcaaaatctaaatgcatttttgattccgcttaaagttcgagtattttagagttcatcaatctgtacaattaaatttgtaaggcgtagctatcatgttctatacttctattactactaaagatttgagattaatttagatattttatgtaaaatttgacattaaaagatacacttaattattttatgaaacagaaaacaatcataaaatgacacttaattagttaatttgatttgagaggaagaataaactatacctacttataaatactttttttgcttacaaagtatacaatgttcattctctggatgatatctaattctcttgttttttcattttcatcacattaaattcagtcaggttttgatttcctagattagttaaatattgtagaattcaacctcatgactgttccttgttttctctttctcttgctagtctacaataactgtctctcttttattctttttcattttaagaatgaacagcttaatatcatatgttcagtattacctgattggttggccgattgttttatgacataacactatgtaatgagttatacacttatacttatatttaccatgcaatgggttactttactttgtacagttgacaacgtaacaaaagaatccattaacagttgaaaacatacatttcataaacccatttctcaacggatattgtcgaatcactattacagttgatcttataacgtgcgaaacaacacctagatttctgatgattcgttactcaatttaataatgctaaatttcgtaatatttaacctcaattaattttgtagcacagcgttcgaacgctgtctttgaaaacatagggagagcagtgtaatcagtaatgttctctataatcgaatcacaaaatcaatgtcaatagtatactatatgattatagatttctgaaaatattgggcacgtgatttgcgttggatcatcgtagggtatgggccatttacaagtaggaggtcaatttataaattatttgatacagatgacgcaaggatatacatgatgcatcatcattattgtattgtttacatattcaagaacaacaggaaaactaaaatttaacacacaaagataatttttattatgattctcgttttctttatataatagacgcagggattttgtatgggaactatgtgccaatataatgatataatctcatttctgaatagagaacacataacattaaacccaaaaatatctatatgagatgtgatgcatataggttgttttgaaaatttgtttccctagcccctagctagtaaggaaatacataatttagttaaaagttataaacattctaacagaaataaaagagtaaaagacaagaaacttattgactaatatttcacaagtgggttacatattttggctttggcccgcttttgttacgggaccatccatgatccatccatacaagtttcaatttctaaaataatgaatatcccccaaattttccgattaatcataacgttttctgattctcgccagcttcttgaaatagaaaattaaattttctacttataaaattttcataaaggcccctactcttaatataaattaacaaactaacaatttttctaagggtccctactttggctaaattgtagaaattgcattttatgtgtaacgtagatgattcagttttccttatttgtttggtcgatgatgaaatctctttaacattgatctcgaaaaaagaaagagaagacaactttcatttagtaaaattgttgaactgaaaaataaaagagataaatctacaaatatttaataactatggggttatgaaataattatggacttttcatgaaagcgaaacttattaaaaatgatctataaaaaaatattgttggtggaggagaatcacaatatttttccgagagaaaatcacggaaaccgatgtagattctctatctccaggttgttcactttctcattcatataaagaacaagaaagatagagatagagagatctaaagaaagctaaaaacatggagttttttttgaattttctttaaattcccacgacttttctcactacgcaagaagagcctatttcttctcagatcttacctttccttcaatctctcccatttgaatcatcattttgtttctcaaaaacaaaaaaacaaaaaaaatactttttctctgcacttgagaacaatgtgtagtaacaacaacacaagtagtggaagctatggagagttacagttacatgatgagtcctctggttcttgtcggaagaaacagaagaaagacaaagtacgacgaagaggacctggtgttgctgaactcgagaagatccgtcttcaagaagagtacaaacctccactttcttcgtctccttcattaccaaacattgatcatcatcatcacactctctttgctccggctagtagcgtctatgatttagtgatgacttctccaaacttttctttccccgagaaacttgcgtcaacgttaccggttttcccgatttcgtacggatctttgattcctccggcgccgatttttcagaggagccaacattctctaatggtaattaagaaaacatgattaattatgagtaaactttctttgtaattacgttataagttcaaaacatttttttgttttttatggtcatgatttatgcagatgaatctaccgaatccatctccaggagcaggaagattttatcaattcatagagcccccttcaaaccaaagatcttgcgtcgattctgtgtctcagtttcttgaagaagaaaataaaaaggcaagattttttattgagatattattgccataatttgttttctgaaaaacgttacgttttctaatgtttttgatttgtttctttggtatctttccatagatattcactgctaagaagaggccatggccttttctcactgacaccacgaaacctagtgttggaccaaccacaacatcaacaatcataaggttttgtttttaatgtttttgtgtttctttgattcgctcattttcttgatacacccaaaatcctaatcttgaatgtgtatgttttaggccggatgcgacacaaaaccggtcaatgggtataactccggttcaagagaccggtacaacaactagcaaccccatcgccattgattcacctacgtccattccacgtcattacccgaggtttatcccgcttggtttacaggtaactaaactagagatcattctattataatttgattaagttgcttagaccgtttcattaaaccatcttggttttagtatgaacaacaacaacaaaaactaaaagacttggatgagactatgcaatggagaagtaagaagcctttctacagctttataccctctggtgatccgagcaatgatgaccaagaacaacgaccatgtgacctatttggatcagctgctgatcatggaattgatctcaaccttaagttatagggattttcatagcaaaaaaaagttatagagattttagaatctgtctcaaatgtagcttaggatatatcataactttcccgcaactcgattattttatgattcatccacgaatcaagacatatttcttaaataagaaggtttgttggtaactctgaaaagtcttggtaagacctttcacttgattttctaatgaaaactactacttttgctaacaatagtatgtagagtgataagttctgttgatttgcaatacaaaaacagaacaaaattctgccatgaaaaaatgaaggaaattgtttctaaggaacttggtttagctatctgtgcaagtgcatataaacttctgatttgagctcaaaccttataacatcagcaacaacttaagaaccagacagagtttaatcaaaagaaacatggtctttatgaagctttcatccacaatatgaaaatggaaaagcacactttgaaattgatgatatactctctcagtttgatcagagctaaaaggtgaaagctttagctctgacctcgaaggtgaaaatggatatagataaggacaagagagaagatatacatagcaaaggccattacacagatccagaaaggataagttgatctcacataagccggtaagccgattgcaatgccaactaccacaacaagaagagattctattgagtattcccatttcagtcctcaaatgtagctttggatatatcaaataactttcccgcaactcgattattctatgattcatagacgaatcaagacctatttcttaaattagaaggtttgtttgtaactctgaaaagtcttggtaagacctttcacttgagtttctaatgaaaactactatttttgctaagaatagtatgtagagtgataagttctgttgatttgcaatacaaaaacagaacaaaatgctgccaacaaaaagaaaagaaaaaaaatgaaggaaattgtttctaaggaacttggtttagctatctgtgcaagtgaatatgaacttctgatttgagatcaaacctcagaagatcagcaaaaacgtaagaaccagacagagtttaatcaaaagaacatggtcttaatgaaaatggaaaagtacactttgaagttgatatactcttttagtctgatcagagctaaaaggtgaaagctttagctctgacctcgaagatgaaaatggatatagataaggacaagagagaagatatacatagcaaaggccattacacagatccagaacggataagtcgatctcacataagccggtaagccaattgcaatgccaactaccacaacaagaagagattctattgagtattcccacttcaatcctctcgagtatacaatcgccaatgttatcgacattcccatcagattgttcatcgtaacatccctgtaaatctgcagaaaaaccacagccaaaagctcttaaaagttgagtttctcatcaataaaatgtggttaaagaaagtgtggtagaaagtaaacttacctcagagaacttttcagaagcgatccttgctttgtctttctttcgacagaagtgtgcagataacgtgttcttcaagtttctaaccaaagggatcactgcaaatactgagtagaaagaaggaactccagctgaaactgataagagtccaatgtttaccataaatggtttagcaagaaagacgacgattagcatcccaccgataactttagtcacagctcttaaggtactcatggagaggaatttagcaacaagagtttgctttggcatttctagctttaaaactccagcttcctcgccctgcgataggctcttaacagaatcggatggtgttctgtaaatgtatgtgttgttctgtcttggagattcttggttatcaaatttgtaatgattcagtagtttcattatcccttcttcgaattcgttctcgtctagttcgccatttttgtctttatcgaactccgcaagtaaagtgctagcaaactcattgatgtcacatttcatctttccaaaaactccaaactccacggttaagtctttaagctccgagatttgaatcttcccatctttgttcctatcgattttatcaaacaaactaaaaaaagaagaagtaaatttgcaatgtaagaaagcagaaaacagaggaaacagagcaaaatgaatagttcttgatttggaaaaaacagaacagaaccttttcaagctttctttacttagttgtccatctctaataagggttcgaggcgaaaaactctgcaaatgcttatgaacttctgacataagctcaaacttggcatgatctaagctcttcttttggtctgccgtatcaaaatactgagagtttcaacaaaaacaatgagtaagaaaacaaagcaaaataaattgtgagcatcatcgagctcaacttcttttttcagagagcgcataccgagtaaacaaagtagataaaggttgaagaacaggagattatgagtgtgatcaacataatgatatcactccaagattgtacatccaataaatcaggcaatgtcactaagagaaatggaactagagtcaagagcataatccctgcagcttttttgttcttaggatccgcatctacgcttgcttctgcagagagcgagaaaccgctaaatcgatgagtcttcacacaaaaagagaagagaaggaatctgcaagtattcttaacgtaccaacaacactttttagtatcttcatcctgtaaaatcctcttcttggattctttgtgtcctgtatattaacagattatattcattgaaattagaacttgttactaatctcttatactaagagataggaacaaaataatcatttcttacagaggatgttcttttgatagatcctcttcggattgatggatctgaattaggactagtcaaaccaaagataacacaagctccccattgcattgtcagagcaaagattgtgtgtccaatagtaactccaacgttgtttccaacaatcattaaagcaccctcgtgggtcgctgctagtccaggcgctaagatcaacaaaaaaaatatcaaaaagtacttttttgtcaaactcaaaaccaattggtaatgaatgaagtaatccgtaatatacttaaaaagtttgatatcttagtgggaaggatccttacatatcataagggcaattcttgggaacatggtaaggagagggaagacgataccaccataaaacccgacctcgaagattacaaagagtttggatcttccttgagacaagaaatagtcaccaatgatcaagagacagccaaaggaaaaaacttggaagacataacctccaatattgtctgcacatggaaggaacccgtagacatggatgcaagctgctttggaaacgttctttggagggtcgagagtgagatacttgtaatccgaggcgccatggacaccatcagagatcaagctcgagttatctagagggacaggacttagtacacgagaactcacaccagagatgaacagagttaaagagagaaagaagaagaagagagttgatgggaaatgtgaatggttgggtctcctcttaaacgagaatgtttgcatgtgagctgctttattgtgaaaaccaacgatgactaaaaacttagtggaagttttctactgagggttttgttaagtgattgaggttgaagaggagagaagagaagagaagagaagagaagagaagagaagagcgagattgcttttagatattgcaactattcttactaaagtttccctgctcatataactgagatctacaagcaccatgttaatattttaatacttaccccaattaggtacttatataaattattgttttcagaacaaattcatatcatgttttttgtagagtcaaattaacaatacattttttattttatttgttcattgtaatttacaaactagcatggaaatacatgccactctgccaaagaaagatgatggactgttggccgaaatgggcaaataaaatcatattttatatttaagaatgaaagtatatatcacttgaaaatcaataaaatgatatctagtgttttatgttagtgtgaccattgtgtcactatttgaattcgaatttgcatatatttagctgcaaatttacattttggttcaacttttgattcttttccatgcaccaatggccaagatcacatgagttaagtatttttaaatcatcagattttactaacaccttttaaaagctataacatccaagcagctttgttttcataattctttatttcttctggtctatcgaccttttttttttatcacaaacttatcaaaacatctgatttgctaatttttccaacattgcgttaaatcaatattgtggaatttcgagagtatttggggattattaggtatgttacctcctctactgtgtggttggggggttactttaatataaataagttttacgtggagcatgaacagttgttatacacgaggatagctggagtattttacaatttgtatcggaaaacacaatgtgacttttttttattcatcgaaactatgaaaatcggagctgaactattttgaccccatcggacctaaatttaaatactattgtgcacttccttcaagttctaatatttttggacttatctaagcttagagtgcaagttgcattaacttacattcaaaaaaataaatcgtacaaacgatatgctgcaggatcacatcaaagaaaaaaaaaagatactgctgccggatcaacttacattgtgggtacatatataatatataaatgtttgcaggggatggtcagtgatatgggccaatacgattgaattttccgagtgaaatatgcgaaaaccacgtgttcttaaaacaatgaatataaatactttccaaaacgaacgaataacatatgataagtttctatataacaatgatataatttcactccaagtctcacctaaaggtgtgtaaccttagttcttgtctagaaaatttaaacggatatagataaggagaagagaaaagaagtacatagcaaaggccaagacacacatccagaacgggtaagtcgatcttatatagattggtaagccgattatgaggccaacgatcaccataataagagtttctaccgagtatttccaagtcaagccccttgtatacacaattgccaatattaccgacattcccaagagattgttcattgtaatatctttgtagatctgtggaaaccaatgaaaatgcccataaactttgagttcttaacgtgttagtcaagttaatgaattgtgattgttaaactgacctcggagaaagtattggacgagactcttttcttgtctttgccacgacagaagcgtgtagatagagtgttctttaagtttctagcgaaagggatcatcgcgaacacgatgtagaaagaaggaattccagctgagatggataagagctggatgttcagcataaatggttttgcaagaaagagtacaattaggatccctacgatgacttcagtcgtagctattaatgtttccatagatagcaacttagtaacaagtgttttcttcggtttaatttccagcttaagaactccattttcctcctgcaacacattaccatatttcaaaaccaaagcctgtttttaaactagctagagaaatatccaaaaatggcatttctcttgaaatgtgcatagacttacagtctgattctctctttgatcctcaacgttgaatttgtattgtttgagaagtctcgcaatcccttcctcgaattcattctcttctaattcgccgtcgttgtctccatcaaaatcctcaagaaaagctttagcaagctcattgatgtcatatctcattctcccaaagttggaaagctctatggttaagtcttttagttcagatatttgtatcttcccatctttgttcttatcagttttcttgaacaaactatcgatttaagcaatgatttacgacgtaagaaggctgaaatgaaactattattgcttcaaaaatatagagagaataaaaccttttcaagctctctttgcttagttctccatcttttataaggtgtttcggtgaaaacctctttaagtgcttatgaacttctgacatgagctcaaacctcgcgtgatctaagctcttctcttggttagccgtatcaagatactgcagagttccacaaattgtcatttagataacaaagcgaaaccaaaagggtttacttgggttttctagagggattataccgagtaaacaaagtagacaacggttgaagaagaagaaattatgagtgtgatcaacacaatgatgtgactccaagaatgtgaatcaaatatagccgaaaatgtcaccatgagaaagggagatagactcaacagcataatccctgcagctttcttattcttaggatccgcttctactcttgcttctgcatatattaacataaaccacaaaatcttcatacagaaaaatgctcaaagataagaaaaagggaacctaagcttaccaacaaagcctttcaatatctttagtttttcgatcaatccatcctgtatgatttttcgatgaacattcagcaaccaatccttaatttactaatagattaaggaaatcctacagaggttgttcttcttactgcttggtcagaacgtggaccagtgatgctaaacacaacacaagctccccattgaattgtgagagaaaacacagtgtgtcccacagtaagtccaacgttatcatctataaaggagctagcaacatccctactcaatgatagtccggtcgctgagatcaaagaatatacgttttcagatattttcttagagggaaccaaagagaaagaaaggatccttacagagcataagagcgattcttgggaacattgtaagaagagggaagatgataccaccatagaacccgacctcgaatattacaaagagtttagatcttccttcggacaagaaatagtcaccgataatcaagagactcccaaaggaaaaaacttggaagatataaccttcaacattgtctgcacatggaagaaacccgtagacatgaacacacgcggtccttgacaagctctttggaggatcgagggtgagaaactcgtgattcaaggcgtcatggatcccatcagatatcaagatcgagttattcagagggacatgactgatcaggacacgagagctcacaccagagataatcagagctatagagagaagggagaagaagagagtaacacctgccatggaagtaagatcgaagatctaatagggatttgatcggataattttcctctgtatacaatcgcacaagatcttaaatatacagtaaacatagaggctttaaggttaattgtagtacgatgaagactgataggattatgttttgataaagcgtatgaacaaattattaagatgatgaatggtacgtttttaaaaacatatccccttgtaatctttatacgtaactaagagctttgaccattcatttggacaagacagtgtgtttgtgattaagagacaccctaatggagagtcattgctaactctaaagcgtgccatggaagtaatcttgggatgaaggagacatgcaatggacctctcatgttatgtagctatagactagaaagattgtataactaaggtcataaatgctcgaaatatctttttttctaatgctcgaaatatctttagtgaacagagaaaaacacagatgatctattctgatatgagaagagaagtctccaaactctactaagtaccaaaatcaaaacttgtactgacagacagacacagaaacagaaacacagtcatggaatcctctactggaaacttgttattaccagtgacctcttccttgtcctcttcctcgaccacctccacgtcttccccaacctcggtttccgcctctaccagctccataggatgatatcccctcaaaggccttgttcacaagctggttttgcatagtacccgacccacgtcccttctttgctgcaacattgttaccacttccattgttgctattagcaggccgctttcctctgtatattattgcaaaggtacaacaaattacaaatagatataagacaacagaaagattgtggattgagtaaactttgcacaaacccaattgttgttgttgttgaggctaacggctttgtggcttctttccaagacaggttgagattagtgtctccgataaaaggtggcacttttgcatgcaatggctgtttcatatcaaaattaactccaagtttagtttatatcatcataactatatgcttcgaccaaagaaaggacaaaaagggggaaaaacaagatgttggaatgttcacctttgtcatcgccaatatgttattacaggtcctaagtccagttgtagtattctgcctctttgttttctgaaataaaaaattcacataggagcattagtactgaaagcaaatagcactaggaaaaatagaaaatagcacaggttaatgtacttacaatactcgctttctcttcatctgtcttagcagccgacatggctttgttgtgctcagtcattccctgagttaatttcttcatcgttgccttagttagatcctcaacaatggttaatctgcaccaatggttggcgaatcacaaaacaaaaactttaagatatcataaaacacataactagaaccctcctacctctacttaatcattaccaaaaaatttctactctaaatgacggtctactaaagtttcaacgtgcaaaaactcggatgtcatgtgaaagaattaataatacctctcagtaaagtctttgttcaactctgagaagtcctcccccaatctgtctgatggctggccggtcacaatcttgtacccacacaagctgtttgtagcatttggaacctatatatataacataatcagataagtaaaacaaggaagaaaaaaaagagaacgggataaatcacaaaataagaagtcgttggcaaccttgtgggcaaggtgatgaaacgcatacaacaaacactcgacgtatgtgaagttcatttcctctccagtctttctagcaggcatgtatatctaaaaacaaagaatgtaacaatcttcataagaccacatgtaaagcttttgcattcataagtgtaaggatgcagtaggatatccacaatataagcaaggatgtccacaaactatttctcaaaggactcatgacatgctggcacttaaaggaggtacctttaaaagctcaacgattgaaggaagcagctgccttgcttcctgagcagttgtgtatggagaaatatcagcaagtgctttgagcaaatcaagtttcctctcttctgggagctagttaagaaaaaaaattggaattaatatggtggccaagaaagctccctttttgtagagatacggatatttacatgcaagaaggcaaaagagaaacaagcaaatatacctacaaatatggattaaataaacgttgcaataaattagaattttacttcataccattagtgacataagctattcttaattatgtctaagagagtagataacagatgcctaaaagagcacacaaggaatcagggatcatgtgctgatacgaaacacaagtgtgaaataacaaagcaatgaaattcacgataccttgtcaaaaacaggtatgatatgtttgttcaaatagataagaaacctgctgcttggagcacctctctgttcagaggaacggaaagttagtaagacaaccagtcaagtttataaaatggactctatccagctactagcagcacttattctgagttcataccgcaaaaaagggaagagccagttgcaggcatgatatcaacctgtcaatatggtccgtatctgaaaactgggaaaaacaatatttattatcaggagtaataccacacagtacatggataatctcatataaatttggctgtccaacctgatacttcaaactattatactcaccatatgggatacagaaaaatctaagattgagtgtttacatggtaatcagagcagacactatcaagtttgtataactcattatggtaatactatcattttaacaattttatgcatttccttgcattcaaaccaaggaccacagaatatactggagttgaagggaaattaacatcactcaagagaaacaatgcagactgtggtacatatattaaagctttttgtcaacaggatggagtttgtacaaggatgaacatacactgctgccacagaacatgtcaaacagaatagtgatatgcaactaaagagaacatcgatacacagcaggaaaatagtagtatcatttcaagcaatcaagaaatttaggttcatcttcgggatgatgcaacacaaccaacaaacaccaaattgcatgatcatacagctaacttacttcaaattgtgcatttaaatccgcctgtccttcaataatttccacaagttcttgcattctttctggaggagctttgcctccaaatatactcaaacttgtcaggaaatccataaacattttaaactctcctccagttacatcttctaggctctgcgaaaatccaaataagtcagaataattggcaacaaaataagaaggtaaatggaagaaacaaaaggaactgcacacacacaagatagtggtcttacctgtttgatcaaatctgttatatgtctttccatctcctcttgaggctttaagagttcccctttaagaggaatcacctacatataaattaagaaagaaaacatacaatgaatataggctcaatgaattacaaacctctcaaatgattgtcaattctaataatatcaagcccatcaaagctacttgaaccctataacttattatctttgatttggtaatatatatccataccattatcacattttcatatcacttcctcggttattgttaaatgttaaggaaacttctttcaaatcataaacaatatcaagaaggaggagacttgactaaacatgcacttaatatcagccactttagttgattgaatagagtttgtacatcttgaaattgaactaatatatagtaatacacaatgcaagactacttcactggtctaaatctacaagagaaaaaaccctaataggtctaacttggtggaaaaaatgagatatgaatatcaaaagattaagtcatgcaacgctgttctgggaaccttgcaaatagcagaaagaaatagataaactctgaccttatctctgatgaaattcaagaccttttcacgaatttgatcatcagtagttggagtaaccccagcatgggtaaataaggcagtcgatgatgctgtaacaaaagagggtgatagttagcaaaacactagggaatcgcagagtcaatagcgatatcatattgaaaatctaagataatttagcagactaccttttggatcttgtcgtaacaatgacatcagagccttatgcacagcatcacgctccacaggttcctcttcaaatcatgatacatccaaatcagatacgaagacacaaacaggtctacaaaatatataatcacacaaatatcaagagttacctgtattcaagagttgaacaagaacatcaacaatcttagataaaatatctggcgtatccttacaaaacagcgggagcccacggatggcttgaacacgtacctacacgcaaaaagaaacacatgtttaactcaaaccaaacgtttttagtataatccagtaagaagctagctttgaactggttcaaggtacataccccaagatctccatcatcgatacagtccatatgcgcatcgaaagcctcagtagagagactagggaagaacttgaagtagcgaggaattagctgcgacgcaagctgctttgccttcatactagtcttggacatcttaatgatcccctcataatcctcaacattctacaaacgagaaagcaaatcaggtaaagtgatccaaaactaaaccagcctaattcgaatccaaagcaaaacccatttacaacacagggagtgctcgattttatttcaattaaaaccctagttgaaaattgagatgaacctgagacttgtccttggaggcattgagacgctcactgaactcatagagcttctcgatttgctggacttcttcggactggttctctgacattacgaaggaagctgaagaagagcgagaaaaaatcgaagcagatgagtaatatattcagatagttcaatagaggaaaagagaagctatatacacatgtaatcacatctctgtaacacaggaaaaaggcgggagaaagaagataaagagcgtacatggtgttcttttggaagaagaagactgtagaaagattgagaagtgtttttcttttctcacgaccttccttagcttgaagaagaagaccgtgagcttaatctattgtccttgacaaaaatcttataaaacgacgccggttcatgtatatgaaactttagaaatgccactgaacttgacgtttcttcaaaatttcacccccgatgtttgtttttggaggaaaatacctgttcgaattcttcaccttgacatcagttatcgatttggaaaggaaattaatgactactttactcaaaattgtttatttataaaagcaaaacacagtaagtatccaaccaaacctagtttggtcatgaaatagtcttattaccatacaaaaaaaattctaatacaaggtgttgttgtctcaagaactcaaaagccagaaaagttttttctcctgataatcacagaagaggcatatccagagcttgtaacacatccttgaactcaaagtcatgagtatgtttattgaaccgctcaagcagcttgtagcgagagtcgttcaaataaaacgattgagctgtctccatgatccatttagcctcctcgtcagtgagtttgcttgtgaacacaacatcgcctcggataaagaccaagtcttttgtctctgaaagctcagtgtagaaggttgtagtcaggtaaggagccgcttgagttcctcttgctttgtagtcttcgagaccagtaaaaatcatgtgaggcgcttcaactgccacaataaaactgaccatttatataagatcataatgaactcttcagccgagttacataactgttgtaatgaagctcaacatgaattaaatggtacatctagcctcacatatcaacacaccaggtaaatgaactgttcttgagattagtagtttgttaatttctttcctgactaagttaaacatttccactgctaatctcactaagttaactgaactttcagataaactattcttgcgatcagtagttcgctaatttttgttctgacaaaataagtgcaagtaaaagaagatccattgctaatgaatctcactaatttaactgaacttaaaagctaccacaaatctggagcaagcattgttatgtaaccatttcatataaatttctcacaaggaaatgaaagatgtatatataatggaggattaaagttagaaccttgagcaaacattgttatgtaaccatttcctctccacaatggaatgacaaagtatcggctgcaatttgcaacatcaattagaaaaagaaaaaaaagatcaaaggattataatcaaacaagaacaaggcttaatgatgttattaccactcggaggctcgttgctccaacaatcgataaagctgagctttcatcgttaacccaatatgacctcgtcccaaatgatactgacaaattgaaaatgtagtaagatccaacgaaatgcaattgaaagacagaaaatttcacataaaaagagaaattttgagattacatcgtcccagatcgaagtgagttcttcaggggatttagtcttggctctggccaaatccatgattgaatccaaaggtttttgctgcaatggtgtaaaaccagatgcgaatctcgaatttctgactgaaccaagcgaagcccattttatgtggtttccaggtaaagaagcttctgagagcttacttgatgcatctcgttgccaagaagatgaacgcgcagtgaaaatttgtctagacgaagaataagaagatgaagagagcttatctttagcaagactcgaaattgaaccgacgattcttctcatttttatggtatgaatacggtgaaattcaaagaaactatgaagatatgcacagttctctggaaatctcagatttagaaccctaaccggaaacgaagccggctcgagatttcgtgggtaacttggttcgacggtccaaaccggattttagtaatttcgctttttctgaaccaataataatgggctggtccagagtctaaaatttccggattactcgacctgacttctaaactaaaccaatgttcaatggacttcacctagtactgtttagtatttacatatatatatttttgttctaccacagttatgtttaacatggcaaattacatgaacacattattattgatccttttagaaaatgtgtaatagtcacaggaacacattattacgcattctactcgaaagattctataaagattttttttttattgtcggcagtagatctataaagttaatataagccatgattgcttccacattttagactaaaatacacagaaaaaaatgagatcttaacccatgtttcacaaatttcctgtcactctttgttttttgtctcacaaaagtattttgtgttataacaaaatcaacttgtttgtcactgatatgagatttgacttaggttgttttgttgtcattattttgaaccgtacaaaaaactgtaaactatttataagttggtccagactcacagtatctcacaagtcacaaccccaccatgcatgtcatatctctttcgttatcctcaatattctttttcctcttcctcacatcaaccattttgatttctccggtacaacccacaacctctaagcctccggcaccacggccccacagagagctctccgccgattactactccaagaaatgtcctcagcttgaaactctcgtcggttccgtcacttctcagcggttcaaagaagtccccatctcagctccagccaccattcgcctcttctttcacgactgcttcgttgaggtcaaaattttaccaaaattggaaatttgtattatctttctcaggcatgccagcgcactatagcataattaaccatgtaccataacacacgcattttagcattagtaactagcatggtcaaatataatgtacaatctcattatgtcgcaataattattgcaaaagtcataacaccaatatggaaatagttcaccggtttggtttccaacgtagcgcattttagcaaacaaaagtcaagattcagcgcattttagtgaaaaactcaacagtattttggtctgcattattgcttgtttaacaaataacagtgcacatctcatgcgtaaaaactaataaattatggactacggtgattgataaccaataatattagttgaaattggaattttgaagggttgtgatgggtcgatattgatagaaacaaagaaaggaagcaagaaattagcagagagagaagcatatgagaataaggaattgagagaggaaggatttgatagtatcatcaaggcgaaggccttggttgagtctcattgcccttctctcgtctcttgctctgatattctcgctattgccgctcgagatttcattcatctggtaattcgaacttcaattctacattcctacttccgaataagtttccattcatatgatttgattattgatgtgtccactgtccaaaccggtcttggaccaaaccgtattgtccactccaatggttgatgacttgatggtatatctacgtgtcattgaataatgttttgttatgattccaaataggcaggtgggccttactatcaagtgaaaaaaggaaggtgggacggaaaaagatcaacggcaaagaacgtccctccaaacatacctcgatcaaactccaccgttgatcaactcatcaagctcttcgcgtccaaaggactaaccgtagaggaactcgtcgtcctttctggttcccacaccatcggcttcgcccattgtaaaaatttccttggtcgtctctacgactacaaaggcacaaaacgacccgacccgagtcttgaccaaagattactaaaagagctccggatgtcttgtcctttttccggcggaagctctggagtcgtccttccgctcgacgctacaactccgtttgtgtttgataatggatatttcacaggtctaggaaccaacatgggccttctcgggtcggaccaagctttgttccttgacccgaggacgaagcccattgcacttgagatggcaagagataagcagaagtttctcaaggcgtttggagacgctatggataaaatgggttccattggtgtaaagagagggaagagacatggggaaatacgtacggattgtcgagtctttttatagattttctttattgtcttgtctgatggtttttgtcttgatcttgatgtgttctgtgtcatgtgtcctttaatttattagcattttcgtgattgttttgttgatagtataaggtatttttttaaagcaacactaacttatcgagaattaagactatctttatcaatggactcttacatgtagttctaaacaattttgatatataacataatgtttaaatattagaaaggctcttacaaaagaagagaataagatcatctttgtcaatggactcttacatgtagttctaaacaattttgatatataacataatgtttaaatattagaaaggctcttacaaaagaagagaataaggaaaaaaactcttagctaagagccatttttcatctcttaagcacacttttttattttttttatttttattttgtttaatataatattttgatagttcttatgatattgttaacaacctattgataatgatgctctaaggaagaaaactcttagctaagagccatttttcatctcttaagcacacttttttatttttttattcttattttgtttaatataatattttgataattcttatgatattgttaacaacctattgataatgatgctctaaggtatttgtcaaaaagattattatatatatgttattggtgacaatattacaactttaaagtgttttacatgagaaggctcacaactacttaaaagtcgaattttatcttaagccaggattcgagtttatatatgggaatttcaaatgctgctacctagttgatctaatccatttcaatagaataaacaaattcttatatgtctacttactttcaaatcaaattaagaagccatgatgtgtataatgtggttactcttagatcatttttttggtaatcacaatcgaagtcgattagattatgatttgtaaccacccaagagtaaagaatataaaacactttacaactttatcgtcatatactctttctaatcttcaaattctctccaagtaaaatgtcagtcgtttcttcttctttttttcccctttggactgccaagaatgtaatatacatgcaagtgtgtattgagtcaagctttcacatcgaaagagctgcatagagaagctggttccaagtatccggcaagccaggaaggcaccagtgactgcaatccgttccgccatcgcctccatatgtagatggatgagcatcttttctcagttgagatagagttgtgatgtcgagtaagtaaacgggcgttctcatcgtgcttaatactcgagacacaatgcttgctgcaggaagtgaaccacctgggtatgttgatccggtcaacggttgcatctgcccgttgcaagttttcctcggctcgttccattcccttcccctattgatcacccaaaaaagaagacatgaaattgtacctattaaagcagcagttttcaacattatatatgcatatattagtgtgatgaacttacatgtagtgagtgggagaaatgccttggaagaagactcgggtttgcgaaacattaacattttgatcaacccattgaccccaagtggtgagtcctttgttgaaagcatcaaggcggtccatgtctctcatcagtgaagacccatctcttataaaatcccacctgaaaaaacaacaattgaaatatagaagatgagttttgtcaactaagcatgtcttaatcccaaaatatatggtgatagctctaagtgtaataataatatggttcggacccttgagactgtactcctgtgtgagtccaccagtgccaagaattgaagacgaggaggtccatatttttccaagcatcagctccatcttcaatggctccaaggttaagcacacgcccgacactttctttggagatgtccactaggtatggtgttcggtataggaatagtgtgacgtcatattcctgataaattaggaatttaaaagatataaattgagtgtttttcttaataaaaccccaattacagaggtaactttgtaaagaacgtgaaaaccaatataaaaacattataaagttttgaaggtaacatgttctatagattttaaaagaaaaataaaatgaagaaaacaagttggttgtcattagctgtcaggtctcctacatccttttcctgctatgttctcttctttttgtttctttccattgtctttgttgtttacatattaattgtgataattcatttatttatttttaaacaatgacacgagataaatgtccaaaacactaagtcaaagcttgaaaacaaaggcaaaatgatatacggtggagggaaaaaacgtattggaggtccacaaaaaaatgcaatatcggctgatagatattgacacatcagtttcatgggtaaaattcattgtttttcctccatggccaatattattatactatctttaaaataaactaataaaatcaccaaatcttcttcacgttaaaaccaaaaaaataaaaaaaaaatggccaaacctttttgcatcttatttagtgtaaattattatttagacgtacgacgtatgatttttttgtttctaaaaatatactgtaccatttttttgacctcgattagtcatttgttcgaaattttaagatgttgtatcaattttttttctttcatttttttaataattacaggaaaagaaggcttgagctaccaatcaaaaagtaaattaatagttaataagtggttgggaaaaaaacgcatttcgacaaaaacaaaaaaaaagggaaggccatcaggcagacaaaatcataataccttggatgtcaagcattttcagaaaacacttttttttttttttgggttcacgattcacaaaacaactttacattgaaaatcaaaggaaaattcgacaaggcttcctttaaaaatagcccgtgacaaactcgattccacaaaatgacaagtcgtcctcgtgatgatgaattattagattttgtttttatctaaagacgcatgttaaattaaaataagggataaaagaaagagacagacctggaaagtgagagaggagagtggggttcgcttgagaaaagtggtcttagtgtttggaaccgacgaatgtatcatacatgccaacgattcccacatgtttagactcagtgagtcacccacgaacatcactcgtttccctctccatttcttcaaaaacgcttccccatcaaaccttcatttacattttacacacatgaccaccattatcatgctcaatctatgtataatatgttgatattgatgttgatgttacataccttgggacggtgcatgaatcaggctgccaagagtacttaaggaactgtttgtctggtcggccgaatttgagacagtcgaactcaccgtcgatgaaagggcacgtggatgaatcgtagaaagggtaagaagcatcgaaaacccatctcccttgaaacaagttacaaccactcgtctgcttcctccctttcaacatctcttttcctcctcctcttccggcgacggctgctaacgccgttttgttgcgttggctcacatgtggtttcttgacgtaagccaaggcttggtcggctccggacaagattgtgagtatgagaagcgaaagaagaaggaaaagagagttgagtttgaaacccatcttccaagaacggttttttttttcttttctcttaacttgaataggctttgtgatggattcgagtttatatatacataggtaaagtagtgtgaagagcttcttggccttatatgggttcaatttttgttaaaaatatcattcattaggaaatccaagaatatttaggctgtccatttacggttcctaaataacaattgtttaggacatgtaaattaaatgtcctaaatagaaataaaaaataaattaatctttatagataaatttaatgtaaaaatttctaaagtaaaatactgtatgatgatcttctaaatctgcatgatttctatacttttggacaatcatcttgaccatctattttggtagatttctggttctcgtaatacatttccgaagttgaaattctattttttgatgcaatcgtgccttttcactttccacaaaatggttttgaccaaaatgaaaggatttattccttcactcaaacataccaaatttcagagattttttaactaaaaatggatcaaaagttcacaactgcatcactaaaatgcatccggtaacgagggaattagtgacagaaaatttattgctataacaaaccgaacaatttgtgatatattgcacacccttggtaacttcgttgttattttttgacaaaattgttgctaaataatcataaattaacgacaaagtaacaattaattgtagtctctaaggcaaagattacaaagaaattgttgatgtattcttaataaattttataaaaagatgaagagaaacaaaaagcgatattcctagaaggcgaagaatgaaaataaaactgttgaagcagtcgttgtactagttcatagtactacaagaagtagttcatttggtaaaacatttggaaattggagtattcttttttttggctttttaattggttttgatcaaattcattttttttcctgaagtgtttcgtaatgaatttatgactgatattctacatactgtgtatagaatttttttgagcgggtatgtgttcgaaacatttttcaacagaatgactaagacatgactggtgttgatcatgaaccaaatgagtgtataacgtacgaaaactcaagaagatgtaagagtcaaatgtgattttgcttgaagagtaaggaataaaaaaattcccacaaagcacgtgtacttgtgtctcttctgtttgtgatggttttgtgaaatgaaaaatggcaaatatttataagttgtaaccaatcagaaaacaacatataatataacaaaaatagtaatctagaaacaatttagagaaaatattcaaaaatgcattatttctcatatttaaaagactggaaaaaaaaatggcccttcttgggaatatgcagcttatttgacatgtaacgtttacaatcgagctgttaaccacctaccaaatgatagagatcatgataagaaggaaaataagaacttattttgatatatactttatatagtgctgattattgccacaatttgatgtcatattaattctggtaataactattgcaagcaaaaaagtatctctcaagtcatccacattatcattttaggtgtgttttcgtggggctcccgtggatgaatcaatggtgttagtgggacattctattgctatacttgtcacgagggacatcttaaatcatttccaatcaattttcacatgcttctacgccatttgttcatttaaattatatatttcaaatcaagtgtgtatataattttgaagaacaaaaatatttttataacatatggacagcactattgacaggtaattgatgctattttagacttgtagtcatcaattgattgtgttttgttgattagtgtttttagaatagtgagggatatatttaggaatattttcacaggagtattcacatgtaagaaggatgttatttcacaattatttttatttttattacattataaataatttgattctgatctgaccgaaaataaatataatgattatatcctgcaattgcagtggaaccaaaaagttgacaaaaaaaaaaaaaagattagatcctgcaacttaacgacttaaagcaatcaaacacaaatgaccaaaatgtaataaattttgatttaaatagtgaattttgacttagtcgaaagaacattatgatggtcgtatggtatatatatatacgaaactaaatagtttgacggattttacaataatatatattttttttagtaacttttctgcatgtgaaaaacatgacagtttaatatataattatcatttgcaaaaaaaaagaaaattgaaattaaaatgtaaagacaaaaactatataaagctttataaaaaaaaagactaaaaactattcatgaaatccttgtaaaatcacataccgagcttttcaccgatttctaaaacaacaacagttcaatactcgaaaagtatatattacaaaaaaaaaggcaaaaaagaaaaaaagaacgaagctatatcagaagaaagtgatgactctatcacctctatggtgcagtcgttagaggaatcgaactcggaactctacttaccaaattttgaactccgaccacggtaactaatggccgttgttgttgttgtcatatactcattaagcctatctttctttctttttggattattaacattccggtccaatcatgacaaaaagaaggattattattgatttttccattttttatagagatcttttgaaattgccatttttactaaaatcttacggatatgccattttctaagatttaaaaacatatggatttcggactttttttgataaaaatacgtagtttacacaaaatactaaactctaaaaacaaccataaccaactaaacccaaacataatgaataaaacgcatgttaaatcttattttggtaacttgaaaaatggcaaaatccacaaactattcaaaaaagggcaaaaatccacaaatgtcatccaaaaaaatggcattttcataattgattctaaaaaaaatgaaatacatgcactatcactaatatataagatattctctttcattcaaataaatacatgtcttagaagttacattaagagagcccttacattaacggcgtgcaagaagacgtaaatagaccaatacaaaaaataataaaatgtggctcaaaagatgcgatgtggactcaaacggcacctcaaccaaaattttaaaaattagggaactctataatgtacctgtctttgttatacttttcatgtgaaatgtagccgccaacgtataaaattcacttacgcaaccggataaaaagcatactgtgctacaccacacatgccttgaggccaagccacgtctcttcggatcctaatgtaacctttttctccccaagtttcgccccaagagtttttagccagccagtacttagttccatcctggctcgttccatacccaacaaacgtaacagcgtggttcgagctggtcccacaaggcccatcatatactcctcccgagtaatgcatgaacccgtccccagtcgcgtccatcgacacagagactggttgcctcgatacagcctcgagcaaggcccgctcgttgttgctagggacggtttggaatccactgatacgtgcagctggtcttgcattggaccggcatcccccatctgatccttggtaagagtagtcattctctgatgcgatgcctcgattttggactacatagttgaaagcgtccgacattatcccaccgtcgcagcctcggtcgtactctctgtcgcagtctagaagctgttgttcggacagagatacaaggttcccgccggcgatcttagccacaccttccactgctgctacagccgaaaatgcccagcaacatcctgtagatatggatatttggtaagttggatgccgatcataatagaaacgagacaaaatataatgaccaaatcatcactgaaccctacttactataaccctataactaacttggacatcaagtttaatattttgtatcctcccaattgttttcgcctttgcattgtatttgattctagatattatacatgctaaattgttattcttacttctatgaaccaaaatgaaacataattaatttaaccatatttgaaaattaattctaaaaataaaattgtaaattaacttgataatcaatgaaagaatattaccgcattggccttggtacttgacaggagtgacagctccttcagctctccagtccttgctctcgactaccatgtcactgacgttccaagtctgagacgatatcgttttggcgaccaccttggatggggaaacttcagttaggccctttagtccggtatgtattgctaggaactcctcgttggtccaatccgcgaattcattgacaccaagcttgtagcttttgttcccttttttgttgaagttctcaatgaacttcaagttcttcttaaacacatcgcgtctcatatttttctcgagctcatcacggtattcacgagaaaatcgagccatccattgctcatgtttatcaaccattgactgctcgcgaaagatgacagtacgagacgtagcttgagagattctgaaacccgtgaaaagaatgattaaaacagtgaccaataccatgattgatgccatttaggttttggaaaatagaggaaataattatgtttttaatatgggcttatgattaatggtgttgacttgtaatgtggtgatgaagtgagaatagaaggaatagtatttatagatttaggattgaaccatgaaatccaattgtatgtaagaaaatgcaacttgacttgaatccatttggggtgatgttaatactttgcattacttgcgccgtgatatttggaagaaaaaacttcactattttttttcctgaactttcttatatgcaatttgtttcgtttgtggtttgcttctttgggttcaatatatgcaattatactgaaatcaaaatcgaaaacctcttgtctagtggttaatcaagaatttaatgatatacaccacgtttggggttacttgatcgtcgattgttttgttgtaataactaaagtaacctttttcagtttttggttggttatgtaataatttaaagttctataacccgtcgaaacacgaattcatgatcttggtccaattttatttcaagaaatctcaccaagtaagctatttaccccatatatttatagttttctttttattattcagagatcacactttatgaattcctttttggttaggatcctcgtagtatgtaaacacttaaggtttagtcaaaaatagcatagtttatgttaaattatgaaagtagtacacttttttcttttggcgtgtactttacatatttttgtaataaattctgttaaaaagttgatttgtttgtcatttccgcaacgaatgactagaaacaaagtgtctaaaacaatacatattatatgtctgcccaatcactgaatggaggagcaatgaagcatgggctcaaatggatgcgtcattgtcatcatacaagtttaatattttggtatatttatgtctctctacttgacttacaagagtcacgtactgctacttgtgagcattataaaattatgatcactgtgtcaaaaacttgtaaagaaatcttcggttaaattcatctttcaacaattaacattggttattgaacaagtgattcttttctaaacttaactgaaagggccaacaaagttgtatgggcttagggccctaccaatctcagggcacgctctgtttgttgctggcatcatttgctttgctttaatacatctttttagtaaaagcacacatgttaatacacagtgagaaacaaagatgcctttgcttgtttgggaatgaaaagcacacatagttatgtagaaatgtcatcatttggtttcattggaaagtgaactgtattcatctgtacagtagttatatgtaaaacgtgtaagaaaaaacatatgatacaactccgagagaaagagaggcgtttgtctttccttagctaagaatatgatcattgaccattcataacctttcatatcaattcactaaaggatcaaactaaacagtaacaaaaaaatcatggtcccaattgcgtagaagaagaaactagctctggcctaaagaatcactatttactccaccaaaccggccagtgtgtttatcagtgagctcgggttgaacaagataccgtgcttcgggtcaccaacactctccacgactctctgcaatagagtggaggtaacagtgagtgtttgttgtgcacataaacttggaaacaagtgaaggaaagagatactgacaacatcatatatcccttgttcagacaattgtttgagatctactgctatttctccatctttcgggaccaagagagtgttgatgtaatatccaggctgcacacaaaaatgatgttcttggatatcgatatatgtctgataaagaagacatcgaaagagtgtggattgtgaagaaccactcacgggattcttgagccgaatattagtatctccatgagttctgttgagagcgtcagcgatagcagtcacaaagcaggaagcggtgaacctgcttgtttctcggtcttggctaccgttcaaaagaagtacctgtgacagagagaagaaatcagattgatttttaccatcattagtatttttgacaagcttcagcataccttacgacatgacctggaagagataatctccccaacaccaagcaaaacctgatgaacagaaagacttgtctataacagttatcacaaatttagtaatccaccatttttgcacaacatatttattgcgggtgctaaccagtgatgggcaaatggaagtgaacagggatcccattgcgtaaacgatacagtccacgcttctcaactgctctaggacagttgggttaactggtgggaagacctgtttaatggacataacaccaaacatttgcaatgtcaaatacaccgtgcaaaacaaagaaatgaagtagagaactaaaacgatagagtttcttaaagggaatcagaatcattagagataacattgaagatatctaggacattctgtatatataaaagcagagtagttaacctcatgaagcagattattgccttcacttgacatgtaaaacactctctttatcttcgatgggagagcggaagtagaacaatgtctctactagaaacatagaaagacaatgtaagaaaataaattctacatatggcaaaattgacatttttaattgatacaagtatatagtaaacttagttctcgtgatcatcaaaaaacaccaatgtaagatattcaaatagaacaccttgtcaactgtctgcgtagtcccagtggtcgggtgagaaatttcgttctgtccgcgtattatagtcccatcctacaaattaaagtcataacttgttagtttgcgaacaaatttgccacctcaatcttgccattaattgtttaaaccaagaagatggccagtgaagcgacagccaagatttatgtatagaaagcgatacttcttcccgcaaataatgatgctttagctgcgatatttgtggacaagaatgggattccataagctagctgcgggaattcaaatagagatcaagcttcatacctgtaattcacatcctagtgttagcctatcattggttgatatcactgggaggaccaaactgtcacaaggaatctctgaaacacgtgaaaacagaaaaattgcagcatctaaagactggaaaaatatccttgctcctgcaaagaagaagttcccaatgctacaagaaggaaacaatcataagtgagttactaaacaggcgaacaaaataatacacagttgaagccgagaaaaagatcttcaataccttccattactgaagcaaaatctctcattaggtcgcctatgaatctgtatcataagaaacatgtcaagtaagaaatgacagaatattaaggtaaagaaaaatttaaacaatcaagaagttggaacttggaactgatcaaatatgaaaccaataaaaacatgtttctctgtatcagttaacattacctcattctgaaagtatatcaagaaagcgcgaattgtttcactgtagggtcttgatacaccatcccacagagaatgattaccttctacaatatcgtacctgtcaaagttccaactcagccaatggtatattacacaatattgtccaccacagaaccttaaatgtgtagcttatagagtagaccacactatgtgcataaagaaaacatagtcattggataaattaccaatctttcttggcctgatgtgcatcaataggtaagcgatggccaagcaaccgcctaacagcaagtgcctctgaagtactctcatcagacagccttaaacacctcgaacgtatatcaccaaccgctggccctcctatagcaacggagatattgagcttagattacttctggtaaaaacttaaagaagctaaaacatatataatctgggtcttgtagcaatgttagtgagttctaaaacttaccgagaacacgaacaatctcagcagtacttccaccatcatcagagacaggaagaacatgagcgactcgtgttgttaacttcttcaactcttcaaccacaccattaaatccagtaccaccttcatagcaacaaatataacgttttccaaaattcagagcaaaagaaaactacctaaaccaatgtaagacaatgataaagctttgcactttgcaacaaacagaattaacaaatgtcaaattctaagtaattggtcaagatctaacacaaatagacgatcttatcgacataaaaatcgtaactttagggagacccacgaaacaaggaagaggaagaaagtggaacctgagaagacgaggagagaaggaggctccacggtggaggaggagagacattcagccatgagagaagtggaattgtagtaatgtggcttcttgctgcggaagagagaatgaagagacaaaggaagagatggtgatttataatggactagacccccaaaatagcaaatctccgccattaccgaactgaaacagagaatgatgaaacatctcaccactacccttttcgtttttgtcgattttccaagcctttggatttttcttttttcgcaatgagagtgcataataaagccataaaagatatttattacgcgttagaaaagaaaataatcacggtactggtggttttgttggttttctacttggtttggtccaataaaccaaaactagtgttaaatcgattttggtgggattgtggttttgcattagtgtttgagctcaaaatacatgtatagaccaaatgtcgatgattccactggaaaggtaccttaagataatctaaaagatcacatgatcgaatggcaaagaagacaaacaataatgataagaaaaagtacactatttggtattaaaccccaagttaatagagtgacataagccttgtgaaaaacgaatgaaacactcaaaaaactacacaaataaatatcattaaagccgatgtaaagtataaactcgatcaaatcacacacattttttgccaaaagatcagagccctaagcactcttcacataaacccaatcaccatctggtaaaagggtctcgacctcaccaaattccgtattcttcgcaattgtctctcgcctcacattcacaaatccttgtgatacgtcatcttcatcgtcatgaagcactttccttagctcgctcattctctgctcgcgcgacatctccatcgcttcttcagagtgatattccccagcttcatcatcctcctcatcgcatgattcttcatcttcttcgtcggaagacgtgtcaacattatataactgctgataaccacctttccacgtcaaacttgaaccctaatcacaaatacaataaccaaatcagcaactgattaaaataacaacatttcatagatgatcattttcctagtttttgtatgagcataggtataaaaatgtgaaaaaaactgctacacaaaaacttacactatctttttcattacgatgatcgtaggaactaggggtataattcgtcgctgatcccaaatcaagctccgacatgttttcggaatatttaaaaactgtagtatccgcttcttcatcttcatcatcaaaatcctcattccatgaatcatcactatcttcggagaaaatgtcaacatcttcttcatcgtcattatcctcttcttcttcttcatcgaaagacaagtagccactctttaacagctgatagtcacagttccacttcaaactcgattcctatatcagaaagattcagtcagagacaataaacaaagtagcaactaattaaatttaccaaaattccgttatacaaaatccatggtgatttacttattctagttaatgagctttgatatgaaaatgggaaaagtgcttcaaacttacactattctcttcatcataatcatcatcatcaataccatcagcaccatcaccataattttcataacaatcatcaccaccttgtgcttgagtgaaactctctgggaattttgaagctgccaagaaaatcaatatgatacttgtcagtcaagaaaccaaaaaagtgctgatgttctagctactttaatttaatggtatttacaataactataatgtaatatatactatatataaaacacataccacgcatagcccagtgttggctcggtttttctttgacctcagcaatgcacatagaccagtgttgaagcggtttttcttttacgtcagaaaggcacatataccagtgttgaatcggtctttctttgacctcagagacaggatattgagaggaatgttcatcaccagatccaccattatctggctgtccggtcaagtcttggttaggctggtcgtcaaatatgtctttggttaactctgtccagagttcaatactctgaaaatatagaaaagaaaaaccaaatcaaagaaaagttgtcatgtaaacggtaagttttgacaatcgaagcctgttttatggaaagatctaactatcatgaatagttctggttttcaaaaggattagaccgtgatcaattaggtttccataaatctaataaaatatctgatggaactgaagctgtctttctatgatctcttggtctttctattttcagatcttatgcaaaacttttttttatactcttcatcgtttaagaaaaaaaaaaatctaaaagaaccttggaaaccttaattctgttttaactactaaatacactaataactaaaatacattatctacatcaattcgtagcatatactttgcgttgatgatgatgatgatgatgatgataaaagaacataggtttagtcttttagccacacaacatagacagaaccataaactcttgaattttagggcataaacatcaaataaagatcaaaccagaagaacaagagtacttaccttctgtatcgattcgtcaaccttggtaaataccaatccgacttcgtccataaacttatcaaaccactggttaccttctacgcctcccataatctttaatttaacctgacctggtaccgtatgaaaacagggaagggtttcaaaaccaaaattcagttatctaactcttaattttagtcaataaaaggaatctccttaatattgtttaagcggcctaaaaagagtcgcggaaaccctaattagaacgatcgagaacgacgattgaatgtctcgaaaattgcacaatcgctaaaagaaaacttacgaatgaaaacgaaaccacgtgcgagaggaagttttagttaagaagatttgcttcggaggaattggagagatagaggaacaatgagcgcaggaaaaaacgagttgggttttaacgaggttttataactttttttcgtttcctaatttctaaaataacacataagactaggacttccgatatacttttgatatcatacaactgcctgtatattatccattttaatttttaagtgataacaatgaaaaatttatagatttgtaaattgtataaaagaaattagtaaacttttggttatttcttcatcttactgatctgaataatttatataacaaacaaagtattcactatatccattggtttagtagtttcatttagggaatgtgtcactaataggcacttttagaaaaacttattccgtttgaggcactttctaatgtttagacacttttccttatttttgaaggataaaaagacaattatatcctttccaaattaaaccattatttgcttaaccggtttgatttgttttgtttgatgtggcatgcaataaaactgactaaacgtgtcaaaatttttttatttgttttcagttttctaaaatctgtcaatcattcgatctaagatttattcatgaatgtcaaagaagagaaactgatggaggaggagcaactattgccggagaagacgatccttgtgttcaccattctgaaaaatggcgcgattctcgagaacatcttcgttgtgaacagtcgcgatttctcgtcgccggagagaaacggttccactgtgtgcgatgatgacgacggagtagaagagattcttgtcgtcggtggatttttgatgcagcatccatggagttccacggtacgtttagctattgatttagaagccatgggtacgggtggaaagtccagtatttttcaagtataatcttatgcattacctctcgttcatgacggttacaaaaattatcacttaatcatatataattctcttgttagaataaacttcataattgagtcgataaattaatctctataatttgactttgaaattgcgaagtcaatgacgccaatatatcttctcagatgcttattcgtgatcttacttaataatattttgtgaaactttgataataattagtgttgttgaagtgatcaaagttcttgttgttgttgaagtgatcaaagttcttgttgtttgcaagagtccagatatatatagataataattattgttgttgaagtgatcatattcttgttgtttgccatggatgctaaattaacatagttctggatacatataaataggtagataatggaattgatggtgactatgtgaaacttttccatgagtatggagtttccattaaagatgtagagaatctgtcggatttacccaaccgaaaaattggtggagatttgaaaaatggggtcttgccgcactaactgagacacttgtttgcaaagaggtacctaatgtggtcttgtcttgttgatttcaaaggcttaatttaagaacaatagtgagaactagatttatcagatttcctgatctttcagatttaaaaaaaacactgctatgaaagctcaattacctaagaaaaacatgttaaaaatgaaagtgagaaagagaaagatgcagtgtcttgtctagtaactctaggtcagagttgaggtcaaaagctgaagaagctgattgacaacaccgatctattaaggtggctcatggatgtcaagaaaggtttacgagaaacacacaaagatgtatatccatttgttcggcgctaggtggatacaccgtcattttttacactatatccatttggtcgatgttacatggatacaactttacttctaaatatcatatatgaacacgtacttacgaaatgtcagctataagaatccgtctattactcttcgaacatatgttctccaactaatgaagtgttcttgtatttgatttttgtgaacaatgtttagatttggtgttactcatcttttgtgtatttgtttgtgcaactaaaacatttcaatctaagagctgtaaaatataggatcattcatatggtgatattcatatgattatattaaaaaatggttaatacgagtgtgtaaaccctctacccttaacgctttgcactaaattagaatttacttaccctaaaattaaacccaaaccctcaacccatgatcattccccactaaatctgaaactgtaaaacaatgcactaaacccatacaaaaattgataattttaccgaccaatcaaacacatttgcagtaaatcaaagacataggtgtctattgatgactgtccaaacggtctaatccatgtggtcatctagtaacttacgggatcgtttcatttcaatacacaagtttataaatgaacgataatcaccaaatcaaacaccaattcaaagtacatcgtcgttcatttttttttgaccatttattcacttgtgtatggaaactctcatcattataaccaaaattgtatactaatcctaaatataacaagaaacatatatacttatatagtgaatagaatgagcacaatatccatggttgcttctgaatggacagatttccttggatgacttcaatacgtaggcgtccaactgaccatgtttgtttgttctatcatctatggttaccaatcatttgaattaagttgaattcatggatgcacagtacgtccgtttgtgatgtaatttaatgtaatgcaaggaatcatctgcaaaattgaatcaaagagaatataagatctactgtttcatttaacaatgtataaatggacagtgacttaaaattcatgcaatgaaaagtcaaaagctaatcaagacatgacaattactcaattcaatagttcaacactaactttgattctctaagatatgtacaacaaaccaccttttacttgtccaattcaaatgttaaaggaaaaactttgaactcttaagaagcaaattttactcattagaatatttccctacctaaacatccaaaggaagtaacctcggtttacattcaaaaggggaaaagagtagaaaattagtgtggaaagaacctgatagtatagtaagttgctccatcaatagaaaatcttcaaacacttgacaaaaagcaaaaacattcaatgatcaagtttcttgctctctctggcgaaaatctgaaaccaccaatatagaataaatgatatattgtttactctcagaaaataaaatcaatcgaaaatagagaaacgtaacaatactttcacaatcatactcttgagaaaaccctttaatcatgacattccacgacatacggttcctcacaagcatttcaacaaacagattgtaagcatctcccatccttccttcctttggatataacgtgagcaattcgttaaccacatgaagattctctttcaaaccaatctgaataacttgactatgaaaagccttacacaaacctaaacaaatatgaatagcttgacattgaaaagtgaggaagcaacaattacaaagacgccaagggattatttgaaggcgaaatcgccaaagagaagcgtgaactatctagtagcacacgccggagaggatgaatcgattgagagacaagaaaatgaagacgacgacggaagagcaagtgttgaggacgacgacgaagaggacgaattaatgtcgtccgattaaagttttttttttacgacaggtgagggacggggaaatggattcgccggtaaaaaactcgccgagataatcgccggagtcgagatgatgttagcgttgtgatgatttaagagtattgactgcttagataaatgaaattgttaagtcgtcgtggagggattgggtgagaaagagaggtttcttacaaattggtttttatttataaattgagattagagaattaaaccgaaattggtttaagggtaaaagggacaatttttttattgaaagtgccctatgttctgaaagtgtcgtatcttggaaattgtttgagaaaagtgtctttgagtgtaatattctctttcatttatgtatttttttttttatttttttttggtttagcaaacactacatgcaaagccttttggctattttggagaatcaaaggacaattttaaataaaagcatcattttagatactttctgtaatgagaataaaaaaggtgatcatcaaatcatttatataaatttgtgtagatatattgtaatatttgataccaatcttgattcttgaatagcaaacaaaaccaatatcaaaatatacatatttatcaacaatatttattgtaaagaactataaaattacacatcatcattttctctcaatagaaataaactaaatatatataaaacggatctctcaaaaacctctatgactttttttcttgtaataatcttggcaatttcgtcatccaactacaatgttttggccgtctccggtattacgatgctttttttttcttgacaatcacactccatatatcaattcatgatgttttttttatgatgctttttacagaagatttgtgtttattttattattatttctttatctttgatcgtttttagagaaatagtgaaatttatatttttctccaaatatagaaccggcaacaagcattcaatctatatgtaagtatcaatattttacatgtttttatgagttttgttttaattgatatatatttatatgtagggccaccgaaatgcattgctctatgtaggccagggtattacgaacgttttgaatgcttccatgattgtataacggaagggtatgatgatgggagttgtgttccagggcctacaacagcaaaatgtggcataatcacaaaaacaacaaataaaatttgttactcctttgctttcgaatgaatttgttaaaaatagaataattcttgcgtttacccctagcgaaatatgtatataataaatcaaaaacataatcaagaattatcaaaaaaagaaaatcaaaaatcttacatgtgcctacaaaaaaaaaaaaaaagaacatcaatcctatgtgtcaagagagatttccattctttatataaatggaaagtatcttttagtatatgagaataaatgcaagatttgattgcaatccaagtattttctttttacatttttgtcccattttatttgatgtttgagataaaagcacaaaaattaaggaataataaatgttctcttattaataaaattcaaccaatagaaaaagatactacataattttaattaaaaattatgaatttaatataaatcaatcattaaaagtagagaaacgcttataaatggaacaaaaaaaaagtctaatacatcttatatattgggacacagggagtattataacctaagggtaaacccaaatattttttatttgcatttattctcatatactgaaagatactttccacttattatttctaaagaatggaaatctacacatgtaggatttttgatttttctttataacaattcttgattatgttttgattttattttatttgtagaatccgttatttcccaaatttaaaatatccaacaatagaattaaatgattaccataaaactacaagatatatattgagaaaataaatatttttctatgtaaagatgatatatttttctatgtaaagatctttgactatatgtaatgaatttcaatgaattcgcacaacaaattataaagattcattacccaaaaataagattgtcaggaaaaatatggaggaactatttatggtaaaaaaacaaaaaggtattagattgaaactttttctgacgaagagtcatataaatatagctttgtgaagagctagaaaattcacacagtagaaattaactaaaaatatatatatataatggatctcagaaaaacctctatcacatttttccttgtcataatcttggcaatttcgtcattcaacaacaatgttttggccgtctcaggtacgatgcttcttacaaaagatttacttttattttattttaatattctttaactatatctgaacatttttagacactacaagaaaacagtcgttttgcgaggaacaattgcgagagaattgcaagtattttgctacaccacggacgaacgttgctaatccctcgcaaatattgcgagagactgtttcctcgcaaatttgcgagaaatgtacgagtactttgcaattaacaatatcaaccctcgcaaaccactcgcaaaaatctcgcaaacctttaccctaaaccctaaaatacatagaaatgatttgggatctttgatttttattaataaatgtaaatctaaatgactgtataatcatacaagttgattatatggtgatgcacaaaaacatattgtatatgtttcaatatcaacatttcataatgaagatgttaaacacttattattcatattattaaaaacacataagttcatcattgatgtatttgggaaaaatgcacatttgaagtttttgagatgaaattagattctaatgtagatatttaacttcctaatgattcagaataactaatccgaataattttaattagtgttttcttgtattttttcaaattgactcaacattgcgaggtctttgcgagggatttgcaagtctgtcgtagcagttccctcgcaaatatttaccataaaccttaaattatttaaaatatttactcatgtttttatttgctaagagtcttattcgaaataggagaatctaaatcagatctgattcaaacactgaatcaaaatggtgagttaattggttgaagaattgcgagggaattgctagacgcaatcgcacttccctcgcaaattttatcctaaaccctaaattattaaaaatcataaattgcgagggacttgctaggagttctggcaattccctcgcaatatgtggtgcgttttaattggtttaaaaatcttcctcgcaatttcaaagcaaactgtgcgagggttttgcaagaaaatagatttctatatatattcgaagacctagtttgagcggagctcaaaccagccgcatccctaaccctaaattttttcttcttcttctctgatctcttcggcgccggagctcttcttctccgatctgattccgtcgccgcctctcttcttcttcttctctaatctgttatactcatcgccgcctctcttcttctccgatctaattacggcgcagagtctcttcgccgcctctcttcttcttcgatctgtgctcgagaaccgccacgtctcctcttctccgactcgatcggttttgcctcataggtaacctctgtttctccaatctaagttcttctctcaaatccgacttattcttcttctccgatcttactctttttcccagatctaactcttcttcttcttctctaatctgttatactcatcgccgcctctcttcttctccgatctaattacggcgcagactctcttcgccgcctctcttcttcttcgatctgtgctccagaaccgccgcggctcttcttctctgactcgatctgttttgcctcaaagataacctctgtttctccgatctaagttcttctctcaaatctgacatattcttcttctccgatcttactttttttttcccagatctaacacttgatttgttttttgtgcaagatgccgtcagataatacttatgtccggtttagacaacagcagcgtgacccgttgcatgtcaattctccgcttagtggtggaaatatctcaggggttcaaggttcaggttcaggttcaggttcaaccgttcaaccatcgcctccaacgccaacgactcagccttctgtcaatcattctgatgttcaagctgaccgtctcaacaatctgacactaaaagagctcctcgatagtcctggtcgtgctggcttgacaaggctagacccaaagcgtcctccgggaactctatggtaaggttaagcttatagtctctggaattaggtcttgtaagttggttagttttgccttagaagtttgattctgccttagaagtctctggatttaggttggttctgccttagaagtttggtcctgccttagaagtctctggatttaggttggttgtacttagcattgtagtttcttagaagtataaagacatagagatccttatgtgttttgttgctgttgttgtaggtttgacgatgactctatagttgcagcaacagtccgcagcatatttgaaagagatttcaaagaacctcatgccaattggtcacagacatcaaaggctacaatcgatcgatggtatgaaacgtttgcggtaaaatttgtgctcttttgatgtttatgcttgttttgtttgctttgtctgttttgtttgctttgctttgtctgttttgtagtctgatgtttgatgtttgctttgtctgttttgtagcaagtatataactgggaccgttcaattaacaaaagagtaagggttgagtttgaagcaaagctaaagtctaggatgtctgatcaagtgtcaaggtggaagggaaattggaaggagaaaggtgatgaagccaagccaaaatggattgatcctgatgtgtggaaaggtctagtacagttttggcaagatccaaagtcagagaaaaaaagtaacaacagcagaaatgctagatatcatgatccggatggcaaaggcatctataaacaccgttcaggccagacctcttacaaagctcgtgcaagaaaacgggttagataagtattcttctctccttaccattacttaaactacaatgttatgaatctaacttgtttatctctttgtgtttcagtgtgagaagactggagaaacaactcctgatttcctagagctgctagatgagacacacagaaaagcggatggaactttcatcgatgggaagtcagaggaaatttacaagcaagtgacatctaggatagaagaggaagagtctcatatgtgctcagtggacaatccggagagcactggatcaggtggattgtctgttcatgccaaaaacaagatttttactgaggtaaatcttctgtgctttttctttgcagcttgttgtgttgtgtacttgtctgaattttgttgtgtacttgtctgaattatgttgtgtacttggcaacttgttgtgttgtgtacttgtctgaattctgttgtgtacttgtctgaattatgttgtgtacttggcagcttgttgtgttgtgtacttgtcggaattctgttgtgtacttgtctgaattatgttgtgtacttggcagcttaattctgttatgttgtgtacttgtaaacttgtctgaattctgttgtgtacttgtctgaaatgtttgtgttgtgtctcttgtctttgatatcaagttctcgtaatcttggcagcttattcattatactttgtgtctgaattctttgtgttgtgtacttgtctaaattctgttgtgtacttggcagctgaattctgttctgttgtgtacttctgtacttgtctgaattctttagtgtacttgtctgaagtgtttgtgttgtgtacttgtctgaaatgtttgtgttgtgtcgctagtgtttgatataaagttctcttagtcttggcagcttattcattatactttgtgtctgaattcttttgaacttggtttctcatggtttttctgttgtgtccttgtgcgtgtttgtgatctttgcaggttgctccgcgaaagaaaggaaggatttatggggttggatctctgcagtttgaagcatcctcagcccatagtggtccaatgcttcctagtgatgatccggtcatactttctcagaagctggctgccgctgaagcatgcattcaatctcaggctgagaagatcaatagcttcgacatcctgtttgactatcttactgaaaaagatcctgctttggctgcaattcttcgacgtggttcctcgacacagacaggacaggccaacccaaatgaaccacctgtgtctactgctccagaaccggaggtggccaatgaggagacaacagctgctgccatagctaaccttgcaacaggatcctctcctccatcaactgtattttgaaaacattgtcttgctttttccttgttatctctctttagaactagttcttagagtttcaaacaatctaattttgtttttgaatttaaacttcaattgtgtatttatctatttagaacaagttaatgaaatttcagctttgaattgcatacaaaatcatctataattaacaactaattaactaggtaattagagactaatcagacactaatgaagtcttaatatatcagaaaaaacgttgcagaacgcttgcaaatccatcgcaaattctgctagagatttgctaggcagtaaaaaagaatcgcaaatccgtcgcagttattgcaagggaagtattaggcaacaattgcgtgtgatttgcgaggaaaacagttcctcgcaacaattgcgagggaattgcgacatataaccatttgcgagaagcgatttgcaaggaactcgttttcctcgcaaatctgttgcgtgtagctgtttgcgagggattaacgagtaattcttccctcacaaaacgactgttttcttgtagtgagagaatatgttttcccaaaatatatgtatgtgtattagagaatactcgactgtgtaatttttatttttgaggctgtgggaaagttttggatcaaactttgttcttggtgtttttctctttgtttctccgtctttgtctccaaaaattttattcactcgccggcttagtttttggaagggttatttcctttcccgacatatgtaatccaccgttgtaatcctttagtgaattttagtgaaatatttatttctagtgaaaaaaaagtagtagtgtattacatgtttttataagattttttgtttgatatatatgtgtagggcgagactgctttgctcgatgtagtccagggtattacgaacgttttgaatgcttccatgactgtataacgaaagggtatgatgatggaaactgtgttccagggcctaaaacgggaagatgttgttgcaccagatgaattatgtattttattgacttttgtattgttggttcttatatttactgaataaaatgaattcaaacattttatttgttccattgccaagtccagtcacattatataatctaaattgttccttcaatctagtttttcttgtgaaattctacaatctgaatatttggatttattgttagttcttttgaaagtaaggaattcctgtaaaaaataaaaaggtaaagaaataacctaaacatatgcattgttgcataactttttgtggtaaatattagctactaattgcaaacgacgacaaagaataatattacaaaatacaatgattgatagaatctcaaaataatactcgttgatactccatttagatcaaataaaaatgataataggaaaaagattttatcgaaatgatacgtaccacaccgagggcactgtaaaagagaaatcgtagtctcccatcaatagatctatcaagaaaggaaacataaaatcaacagaattaacttaagagaaaaaaaaacagaatcacccaaaacataatcaaaatctaaccggatacatcggcacttagaatcaatgaacatatataaatgcaaccagtaatttacctttgcctttggcccatgtcagtgaatctatacagaaacttcaaaaaataaatagtccataaaagttgcaggaaaactgaatcagagaagaaaggaagcgagaggtggaggctttttgtaggaagtaataagttgcagttattgaaaagtgactattgatttagtgtatttaaatataagaaataagtaattaggtttcatcttatatatatatatatataggtttgatctattaaccatttttatgcttaaaacattaatgaaaatggcaaataacaacaagtctctttcacatgaatgccaaaacattaatccacaatctaaaaaaagactattacaaatatggaataacacaacaaccgacttatataaggtattccaacaagtaattggagaaatcttgttaaccatatggaattctaaacacaaatgacaaatctatcaaaatttattacacacgccactatactaatgcatacgaatcctaggtcgataatattaattaaattgtttaaaaagaatcctcttgtatagagagtagtaaattaaagtagtaattggattcgattgattgacaaatgacaaattaactactttgccagcctgtatgtacccaatagcaaccaaattcaccacgttcttcaacgggtttagaggaaaaccactcaaccccaaaaccaaaacaaattattttttaaaaaagagagtaaataattataatcagcacgattgaccgtcggagtaacaccggagccgcttcatgggaaaatcatgccggaaactaccgtgagctgcggctgcggcatgctgccactcctcaacgagcaagccatttataagctcgacttggcgaacaccatttccatctccaagcataccaaccacgacacgaccaggtggtttggacttccgacgaccggcgccgacgggaacgttccggagtgcaccaccggcggtccagtaacggtggcagcctttacaaaagtgtcgaggctgattaacgttgtagttgttgaagtaacagaactttgtctccatgctcttgcatcttggacatgctatgatcttatccggacgcttctcggccgtcagatccgatgatgatgatgatctaacggctattgtggcttcttgctccggcgggtgtgtctcttcttcattttttattgttcgagtgttaaatgcaatagttttgccaaagagtttaatcccttgagaatcttgagtcgccatgaaaacgtgcagagaatggaaaatagcttatccaaagtttgttgggggtaagaaatagagaagacgtctttttatagaaagatgatagtataactttttagcaggaattggagaagaaaagtgactgaattagtggagattaaaatatttatttgttaaaaactttttaaagcatgtagtaataggcgcattcatcgctttacttttgggtcttgaattcacatctacacgtaaaacacgaatgccaatgcggatcaagctacaaagctttctttaaaaagctaattatttgaaaagtgcaattcgtaagtagttactgtaaaaccatacacgttttccctttttttcgtccacttactctatagaataaatgaatacacattaattatttcgtaacaattttagacaagctagtggatgcttgaacgtgatccaactaaaataagattaaatttacttgaaagagattctataaacatgatccatctattcacatccgaatttgagtctatgttcatggattattaacgaattagaatttcagggttgtcgaaattatagatcttttttttgattaactagtatctagatataaaaatatgaaacagatactaaaaaataatattctctccgtttcacaatataagttgttttagctaaaaacacacatattaagcatattaacttttaaaaagttcagccaatcataaaagagactgtaaaatataaataatcataaagtattaaagtaatatataacttgcataaaaacttgaaaacaatttatagtgtgaaacaaaaaatttggtctataacaacttatattataaaacggaggaaatatccaaaacgaacaaggcagtaactcatgaaaaggaaaatgtcttgttcagactttttgctctctaatattttacgaatttgataatgatttctcagtgcacgagtcacgagttccatttttctaaaactttaaataatctattatcattaggtttgaaatgcaactctctagatacctaggagtcttgccccggcccatacatattttcttttcaaagaacatttggatggatttgtgcgtgtgtatgtgtttaaacccccaattaatactgatctttaggattgacctcatcgtttttttttggaaatcaagattgaaatatttatctttagaatttagaatggatgaactatatactgtatatatatattttagatgtgatctaacttttaagacatagccgtcaaaaaaagaaatgtttggtaataagtcagtgttaaaaagaggaaaagagaaaggagtatgagcttttgagacagagacatcgttactcatatttcatatttcttccttttgtcagctctaaagacttcttgtgggtcctcttcacggtagccttctcataagtattcgaattgttttaaatttaattactaatatcttatacaccatgtcttgtcgcaaagtggccagattgaaactatatataaatggtaaagtgggtcggacgaatgagctaagtctgatcaattaatgatccaatctagtgtcgatggattgaccatctcagctataatctcactcaagtatcaacgaccataagtccagtcctagtatgatccggctcgtcagtgaagttcaaaatggatcataattttctcatgcgttgatattcgattgaaagacggagtcttttgaatggaacattgaggaaagataaagcaaagcaaagtacttttctgaaaatatgccactttcaattaacctaatcccatatttggttgacgtatataaaatataaaagtaaaactaaggaaagtgttagaaatgaaaggagaaaagaaggaagaaaagtaaaagaaaaaaaagagaacattgtttttaacaaaaaggaaagaaagtaaaaaagagagcattgatcgatgttcatctctctttttctttctttgagtgtaatttcatgttcatctcccctttaaattgtagtatgaattttcattggtatctttctagtcataaaggaaccacttttacatggtatggaaaaaggatagtctattgtaaattaataaaaagaaaaatcttagtgatttcagctttaccgataatgcttttcttttcaaatttaccaaatttaagtaacatccaatacaaatatgccatgaccgttctttaacgaacgtacacattctattagagtgtatatacttggtttagttgtggttaagtttggttagtagttttggtttagtttacttgtatttaagcttaatcatgtatcacttttacacttaatgaagatttcacgattattgaaagagataagttggagagtaatttgcaaaaataatttgagaagtagacactttttttagaaataggaggaataggtagttttatctctcctctctaatagaactctccttctaatacagcttttagtaaagtacaattttacccttctgttgttttgatgaaataaaatggcctgattaaaagcaacccaatatcatctccaattttggaattgttcatgggcttgacattaattaaaactcatattttcttaagtcattgaaaccaaacacactcatgttttatctgaatttgataatgtacaaaaataatataaaataatagtatacgacaataatatttaaaaataaaacaacgatagtgtacatgatattcacggtgtacataaaataataaaataataaaatagtagatgacaccatatacaactctttaaatcgtctatcgtattgtacaccgaatctagagaactatttggtgtacttgaaagtctatgagatagtgtacaaacatcagtatacaaaatgatgtacaccagtaaattgaaataataggttatatatattcaaaaatattgtacactaaatctataaaatcgtgaataatttggtgtatatgaaagtttttgagatagtgtacaaatccagtgtacaaaatgatgtacaccagtaaattgaaataatggtttatacattccctattagtataccccaaatattgtacgttatgtctaccaatttcacacgttatcatttaaaattgtgtacatcattctgtcacaaatctcgtatatcataatattgtacaccaacatgtataccattaagtttaattatattaaatcatttaagaattgtgtacaccattccgtcaccaatatcatgattttaatagtgtacaccattccgtatttcatgaaaaattgtgtacaccatagaattttccgaaatttcttttaattgacaaaagtgatataatatacattccctattagtataccccaaatattgtacgttatgtctaccaatttcacacgctatcatttaaaattgtgtacatcattctgtcacaaatctcgtatatcataatattgtacaccaacatgtataccattaagtttaattatattaaattatttaagaattgtatacatcatcccgtcaccaatatcatgattttaatggtgtacactattccgtatttcatgaaaaattgtgtataccatagaattttccgaaatttcttttaatcgacaaaagtgatataatgttaaatttcaccgttggaagaaatggactgaaaaaacaaaaatgattgaaattttttttggggccaaattacataagtcaaattaattaggctataaaaatagtatttgacccattatctctaaaagatttgggtctataccaaaagttttttctcacaacacaaaagggtacaattgtatttaacatttactttgttttttagtcatgtactttctatctcacatattttctatctcacaaaagtaaaacaagtacctatttctctaatatctaaaaaaacctacctacttctcaaataacttttgaaaaaatgtctactttactaataaacccttattgaaataactccaaaattccgtaccggaattccagagataaaataaaaaccaaagaggagaacaaaatcaacctcctttgaaaaaaacccaagcgcaaatgccactagactaccacccagtcacccacttgattttagactttttagtgtttgtggttgcatcttttttggtaaatctggctgtctcgccaattttgctttgctctagtgatccaatcaaaataatttctgattctctttcttttagaaataatttttccgaacataaaagtttaagaaatttaactttaataacgaaattcattatgtataaaataattctcgtgaaattgtaagaactaagaagcatatcaaatgcttatctttgatcaaaaaaaaataaaaaatgcttatcttttgttgtatcagatagaaagtgaaaatatttaaagaagtgtacaaacaaggacataatcttttttctagtgtgtcaagtactgactcaaattaaagaacacagcgaatttcacggcttagggcttcgggtacttatatagtactaatgattattttccaagatcctatatttgccaactcacgttttaatgtatacctaaataatttgtttaaaaaaataattaattcagttcttttgtttgtttaattatcaataatcatctagagattcagacgtaacatattctataattattttatttttcagaaccttatctctttgttgaagatacaaatataaacgtacgacaaaatcgacctatatctactacacaataaacatatgagaaccgaaatgaatgatgttgtcatgtgtcgctatcgctccatgtatcgctttcgccttctccatcgtcgcttgctacagcctgatataacaagtccgaaatgtaagtgctttaatgaccaaaatggtacttgcaaactgaaacgtaagattataaatgtgaataatgtatggaacctgtcggatagagtttgccttctctagaatcacgctaatattggtgttcattgtagtttctgatgatgatgtctttgtcctgaccacacgtctcaagttgaattgctgttatgattcaaaaggttgttgttggttaagaaaaatgcattttatgactttgtggaaacagaaatgagaattggaggatcaaaaaatcatttctcccatttcattcctatacaaacgaaactaaaaacatgttcaaaatatatttccatttcgattaagagggaaccgggacaaaaatgaaatacgaaaacaaatgtatatatttttagttttaagggtttgagttttttttttttttaattatcgattatgtaaatatgttccttaataaaggttactttgaattaatagaatagggaatgcattttcatataccacagaaattttctatatagctaaaatataaagcaagaataaaagactcactttagttcgaatttgatgcaagaagtctccagcttctgtctcatttgtgttgccatgactttgcttataatccctcacattgttcttcagatgtacctatcaaccatcacataaaataccttataccaaaaagatgaaaaaaaaaaaacagtaaaaaggagaagaaaacttaattctccataccttggttacaagtttaggatcagaaacagtgacaatgtgtggttcttttttcttgactgcagttaaagaattgttgttcttctcaaatgcctgtgtgagagcatcctttagagactgcttgttgttatcctcgaatccagctgacggtattttcgaaaccatccactgtaacggtgggagaggcggtggtaatggctcagctggattttggaggtaagagacattttcaactaaacaaccatttgttgtttcaatctttggaaatggaactggtagagaagaagcttcagcattgactctgtgaaacgaatcatagagctcttgttgcctcttgctttctcggataccttctgattcttcttcccactgttgctcagacattgacacagagcgattgtcattgtcactgttgtctgaaatgtaagaagaagatctacagaaagtgtccttgtctgaatcagaatcaggaagtgaagtagcaatagtctctggcaccaactgaaacgaagaaaatgtatattcatctggaagttttagctgtagttcagaacttggcaaggtttctgaggatttgaaagatattttcatgtgatcaagtggaggagatgaagtaaaccaatcaaaaggagccttataatcttctcttaagtgctcttggaaggtttcagaatcaatgtcttcaacaatctctggaatagtttctgctataattttcggtttcgatggtttcagtcctaggagatttccattagtccatgttttaatggattcagtgtcacaagaactctcaacttcttctgattcttgatgttcttggataccactaatatcatacaaaggatttgagaagccattggaataactatgagtgccactacttatttccgaagccgcccatggatcttgatgaatcagttcatcagatttatataccggtgatgatgataaatgtagctctgatgtagcagcacattttgtctcatcaacactaaagttgttagaaatcttctctgtttcttgctctgtaatatcattgtaaagattcttctgcacctctttagtggcttggaaagcttcatcattttcagattctgaatcgatggtgtaaagtgcatcaacaaaatcatccccttcgctttcagtctcatcctcattgtccatttccagttccttcggtttgatatcttggaccgcttcaaccgctgaatgttctttaagtcttgataccggttcagcatccaagacaaagttagtttccattacttcaggagcttcatctgttgcacactgcagaacattgcattccactatctcagctttctcgtgccaactaacactagaagaaccacgagctgttaaatcttgagaaggactatcactttcactttcactttcagaaagaactgaagcaatggtgcgagaacccggtgtaaaccttgaagaagaagataccctcttcggtttctctccaccacttcttgaatcgaaagagaaagaacgatgctcttgcaagtcggatttcgactcaatttcaatcgttgaagcagttttagaggtagaggttcgtccactgaagcttaaagaagtacatgtcttcctgaacatcatatcatatattcatgttttgagtcatatatgaaaacatctctacaatgtcaaatccaaatgtcattacctgtcactctggttagccacagaggcaagtcttgatatatctcgaccgcgttgtatagattttttcttctgcatcatccatacaagtttaggtagcaaacaagaaaaagaagaaactctacaaaacatggtattaacagactgaatctctaaaacaaaccttaatctctgaaggtttagaagctcttgatgctcttttgaaatgagtaggatccgagtatcgtttcaaacaagaacctggaccatttatatcaaatctgacaaaaaccgctaagaatcagcatcatatttattatcatcagtctaaaacatagcagaaacagtaataacaaaaaagaaaatgagagttaaaaggtgtatatacttgtcaagcaagtgtaaccgcggaggttcccggcaatcttcatatggagtcataataaacggtggcaattcgtcatacataaagtgattttgcacatttggtatacgaggatgccactccagacctaaaacagcatgtaaacactatgttcattaactatacttaaattttctaaagaactcaaatagtgaaagatcatgacttatttaattaagatccataagaaagactactagtatcattcatcatcaaattctaaactcaaaaaagagtattttaagctaagaagttagtgcaaaaggcatgtgagctagggcctacaataaactcaacaggatataaatttttgattaaagaacaaacatgtgaatctagacattaaagaagattgacaagagaaacaagacaaaagaaacctccagtgtatgcaaaatgaatgtgatttgtttgtgcaagcactgtcttttggattgtaggaactttagcttctatttgcttcaatctcatcttcaatttgttgcttcttgatgctgttatcattacctcctcttgtattccatggaatatctctgctgcgaatctgaaacaatgtgagtttaacataaaaactcaggacaagtaagattggctgagaaccataaaataagcaaatgaagaagaccaaacacagcaaaattaaagattttacagagaatcaaagaagatcactgactccatattgtcacatttttacttaagatttttttttttttaaaaacatttataagtcaattataaaaaaaaagaaacagaggaaacagagttgacttaaagtactacttactctgtgagatcaccgagttgacgcaagatcccgacgagtccagaaacggcgacgtcgtcgagaatcgctttagggtcttcacggtcgacttttgtgtgaagctctttttgccctaaaccgtagacattcctaacttggagcctaacaagcggcatttgctctgttcttgagaaagattccggaggaatgatcagatgggttttgaagataagaaacaaagattgagtttttgtgggttatgttgcttgaggtgggtgagagattatggcagcttaaccgccgaaacgagagagagagggaaaatttggagattacaaaaaggtttttcgttgtaaaaagagaaaagagagactcggagacattgctaacaccgcaagccattccctttttcaatgtcatcattttaactaaaagtgctaagagaaaattacgaaaaagggcttggagcaaaaagaaaggtacccataacctacccatatggagcgaatcatgatccaaattagtcatttgttacttacataatttcccgaaaataaactttagtttttataagaatttgttagtgctaaacataaattatttaaaaagaactataaacatttttagtcatgtgtataacccctacttgtaatactatatttgtatgcttaagtcatctaatgagaacttactctgcttaatcttctactactagctactaaaacaaaaaacttctactacttgtaatattatatcatatacattttgcacaaatatggagtataaaactagaagttaaagtttggatcattgaatgagcatttgaagacttctattataaaatagaaatgcgttacagtttagatagcgttaaagtttgaatcattgaatgagaatttggtcgtttgcgaggaaatagacttgttgagttggctacatatttattggagaacaaaactcccataaatgaggcatcaatacatacgtaacacttgtactcaaactctatagctgtgatttgtttttgtttttgacaccaactatatatgaatgatgatggtacaattcaaagattttcataatgaatctagtaaagcggaagtgtatgtattgccgtaatggtgtgcctctcgcatccttgatctatacaatcaagtttgatgttacaagagttgcataatatcttccatctacacacgctgcgtagtgtgtgcgcgtgtgggtgaatgtattcatacatctatatcttacactacttgaggacttgcacacatgcatgtggatgtgtgacttactccatcctcgtttaggcatatatacacaataataaatcatgcacaagcattttagatctgtgcttctagagttttggatctggctcccattaaccaaagcaatttatcaactcgaattcttttgtcgtttttcttgatactaacatataaatacattttatttataaactacagttcagacatatggatcgaagatccacagtactactccagtactccatacaagctaatacacagtattagaagtaatcaattcttatggtccttggtaggtatagtattattaaataagtgatgcgattagatcaatgcatgacttttagctggtcgtctatttatggatgctacctaaacataaatttaatcacatgtcatttattatttattattactcctaaattgttctgtccattaaatattttataagttgttacttgctactcctatcaaccattaatggtaatctttgacgcagattctatgagctatactattgcattgttttccatcatatattatcaatcacaagtaactcttcacaaaaaatggcggtcaataaagtgacacttacaaaactcaatggtttaaataaaaactacaacattgctgaaaaatatacataaattttaaacacgaaattggttaacaaaacaaaattggcggtcatctcatgtttttttttatatcatagtaaatctcgaaatgtgctttgattaaagatcagaccatcgaatggtgcactagcattctcatataatttgacatataaaatagtataagtaacaatatactaatatagtagtagtatattaatcatttgcataaatataaaacaagaattggtccaatgacccatcgatggcatcaatgccttgttcttggatgaaacgtggcatatacagtacggtgtcggattaagacatgataccataattagatatcgtatttttcgaaaacgtcaatatgttgttagttgattttatgagaggcaggtttttccaataagataatctttcttttatttaatcagaatccaactcattgactttgcaattgctgataatttattcacgatagaagagtattgatctgaagcaattacatagtgataaatctagtagtcattctaaattattaagatataaaatcaccaaactggaaattgcttcttctttttcttgttaacatcaaattggaaatagctataagagaagagtatagctaggaggacccatcacccatccatgatcaggctttaaatataatttcgatcccttcatgctgatggaccacactcttcccatggttttggataatattctagttatagtccatatcacattttacaccaaaaaacaattcttaagatttcaaaaaccattttacatttgagcccatgattattatatgtaaacaaaggttcagaatcatgcaagttaagatcaagtaatatcaccaagctctacgtttattcaacacaacattggaccttaagaaatctttatgatcttgtaaggtgaattatggattcatactaattaactaaaagagagtttgtatacgcgctaagttatcaaatttagagaacacaaacaacaaatgaacaaacacatttgtttggaaatctctaggcccaaaccaaacccattgaaagcccataagctcaacatcactgatctatttcttagtattgggctaatatagtcatatgtcaccaaagtccaaacaaagaaaaatcttcaagccgacaacccgatttccataaccggatagaccggattgtgggtaaggagtttatgcgggttgacccgatttcacaagcgtatctgtcttgtttaatttcgttactcgtcgtcgtcccttaactcgagaaaaattagggttacggattccgattagcaagcatggaagagatcaccgatggagtgaacaacatgaacttagccaccgattcgcagaagaaaaaccggattcaggtttccaacactaagaaaccattgttcttctatgtcaatctcgccaaggtacatacacagtttattcttcgattgctaatggaactcgtcttctaatctaagctttgaaatttctgcaatctaagatctttttcaatcgcaaatatgtgaatccagtccaaagtctcaatttttatggcaatctctttacttaatacgattttactgtttcaattaggaagagccaataagtattttagcttgggttggtttagggattagtttttttggttatgattgattgatgtaacaaagttttgttgtttggattttgttcagaggtatatgcagcagtacaatgatgttgaattgtctgcccttggcatgggtatgtttgttcttaatcacttcattaagctaacattcctctgaataaatggtttattggtaaatactaattaagattactcttcaacatgaatgtgcagccattgcaactgttgttactgttactgaaatactgaagaacaatggttttgctgttgagaagagtaagtatctttatagtttcactattggagatttcacgactctaagctttgctttttttttgacaaatatggtttcttcttctatatagagatcatgacttcaactgttgatattaaggatgatgcaagaggacgtcctgtgcagaaagctaaggtagttcttcatgcctactacttgtgaaactataattttcatcgacctcttatcttgatttaacagtttggtttttggtcttgcagattgagattacgcttgtgaagtcagagaagtttgatgaactaatggctgcagccaatgaagaaaaagaagatgcagaagctcaggtgcagaactgaaaatagcttttaactattttgggtttcttgatgcttattctataaagggctttatttgtttaatttcattaatttttggcttgttatcacaatggatggtttgttgtatctgttaacttttgataggaagaatgatagctaaacaataaaacatctcggccataaattttcttagcatcattctaccacaatttctcaaaatttggactagaaaacgatgataaaatctacagtgatatgaaaatatatgtcttaagcctaatgagcataataaaagtgatatttgtcacagtatatatctctagaattggttgagacgacataaatagatagaaatttaaagtttacaatttgtgactcaatttgggtgaggaagacactaacacaagccactcgtgacttgtcgcttttctttatttttttccttcttgaaattccattttcgtctccgtcatcttcacggcacagaaatatacacaaaaccaaaagcttactcaatcttttgtttctctctctttcacatgcctttgttcttactcttcctcaagactcaagtctcgtccttttctctaggccctctcactcagactcatcacactctctctcggtgcagataacgaacttacacaactccgaagctcctccctccacatctctccggttagtagatttcacaattcaatcatgcaatgctccacttagtttctacattgcttcaatgatctctttccattactccccataaatccttttccaatgatttgaatcacgggtttgaaagtttagcggcgcaactatatatttgaattaaatgaaagtttcttgtaaagttcttaacgtttttgtacgttttccatcttcttcagatttgtcgttgggttcatgtgtgtcagtatgtataattaattacttaaattagtcaactactatggaatctaggtagctccgacttatttatttatgttttggttttccagatctgttttggagaactgtgtaacatcattaagtttggcagagaaaaataagttggtgtcagtccatctctgatcttctctaacggctttggttggttctatggcggagaaacaacttaacttcgatgcacctcttctttcaacaaggaggatgaaaaaatctgcaatctctgtacgcagaaacatgccaaagcagctcactgatgagtccaagacaagtgaatctctttctgtttcagttcttgtccaagacatgggtttagatcaggttccggattctcccttggagagtaaacatgtagaagaagaagcagaagagagtgaagatgatgatgttttctctgatgcccttgatacattgtctctaaagcaaagcataagtggtggtggtggtgttgaggcaatgaaaccgtcaatgccatctgaggatcctcaattcatgttggatcgtttcttacctgctgcgaaatccttgactctggagcaaccacctcaatattcttggaagcgacagccattgcccctcatgtcagaaccaatgagacagattagagatatagtaccagcagagaatcgtgcaactcctacaaggtatgagtctagttttactccatcttattatcaggacatagatgacgaagaaagcgaggaggattcagatgacgatgaagtttctgagtatctttctaagagaggctgtggtatgatgtctccacaaatctgctttaaaaactcactcggtatgctgagctcagtgaatggtcttaaagagaaaccttactctctgagaaccccaagccatgatcaagtgaagtcaagcaaggtcgctcagctcaaatctcggttccaatctgtgaaaaaggttccttctcaagcatctccttccttttcacctttttagtataatatagactgatcagaaactcactgaagatcaatcaaaaatgttttcagctcgctcttgattataagcaaaagttgggaagtatagctcagtctccagtacacccaagtgttgggaagaagtttaactttggttctgaacaacatgaatcgaagagttctgcaagtaggccatcatctccttacagacaaaatggctgtatgtcaccgtatcgcagtgtaggaaacagttctcctcttcacgctgcgggtttccctgggactcgtaaggaagcagaggttatgagagctaacaggttgaacaagcatatcagaaacataagcaagtctcacgaatcactctatccaaaaagtacaaaacaagactgttcaacgagctctgccatggagaagacattatatgttgactcagagaattctccaaggaccagcaatgagaatcgtagctctaatgtcaagaaattgccagaaacaatttcagaggaacctgaaatggagggaaagaaaccgaaagccgttcgcgagcttaaggctgtagaaactcttagtattagcagtggagtcaagatgatgaaggcagatgagttgggaaagaacaacagtggctgtgatctatctccacttgctccgccgccacccaaaaagccttccgagtcttggcttttcagtaatctgccgtcagtaagctcaaagatcccttcaccgagatacctgtttcatccccaaaaaaagaatgttgaagaaaactccacaagtgttaccaagtgggaaactatagtcaagacttcttatacgcacagagatcatatacgctattctgaagtaagcatgtaaagttttccctgggagataaagaaacacaatgaggcgataatactaacccttctttgatcttcgctatatcttttgcaggaactcgttgctcattcatcttgccaatcaaaaacttagtggtttgaagctcccttgggatggatcatcacgttgaattacaatttcatcgacgtaagaaaaccgcagtttcttttgtgacccttagaacacttaacacgtaatccctcagattgatttacatgtgtagttatactttcatatctgtgtgttgcctacttaactaataagaagaacaattgttcccagtaaatgctatgttcatatttctatctatacccaattcaaacccaattaactgttggaagttttttcaagctaactgtttccattcaggtgaaggttaccaggactacaaggcagcaaagtctacaggtaacatttacacatttcagtttatcatatagtctctctgatgaagcataaatatgtgttagcttaggatgaacaagacagtgttataggggaaggccgagaaaaaaattccattaagctcgtctctttgtagagatacatgtacaacatattagcaataaacgaaaaactagccatttaatcgccagcaaaaaccgtctaactgccttattaagatctcactcttaatttctttttttctctgatcttcctaatcactctcattacaactctcactttcatatatatacacaaaacaaattaagtatagtaacaaagaatgttaatattcgtttctatgataccttctcttgttatgtcttcttctctcgaccttcctgttttcttaactttgtcactgttcaatttcaggtggcaaacacattacttcttcaacttcatctgcttggtaatgcatcagtttctccagctgtggtctaagttccttgttgcaaaactcttcatactcttctatatttcctcctttcttcttcacttcaaccaccacaagagatggcgtcagctcaaagatctcgactctaattgtcaacggtcctttagctccttctctacaaccttctagcctcacgctccaatccttcttcctcaccataaatttcacctctttggcaatctcttccaatttcgatatgatctttgtcataggagcagcagatacaaaccttgctccttgtccaccttcttcaaacaaacccgaaagatctgagaacgataagatgtcaaatgcgtttagactcgcgggtctcggcattgaatcaacccttttaatatcaaactctgcatctccttctgaagcagtcgatgatcggcctgatgacaatgatgatgaatcgtcatcatcattgtcatcatcctccctacataacttatcgttttcaatatagaatttgacatgtttgaaccctttcttgaaccatctatgcttcatgatctccggtattgtgattcgggtatctggattcgtgtctagcatccgggtcacaagccttgcaagctcaggagaaaaccatttaggacacttaaactgccctttatatatctttgtatacataaccaatatgttcttgtcatcaaatggaagataaccagccatcaatacaaacaagatcactccacaagaccaaatatcggcttttgcaccttcataacctttccttgtcaaaacctcaggcgccaaataagctggtgtcccgcaaaacgtttgacagattccttcttgcttgagctgctccgagacaacgctgagcccaaagtcagagactttcacgttccccttgtcgtccaaaagcagattctcaagctt

SEQ ID NO: 327 - DNA, 112763 bp, Arabidopsis thaliana
gaattctccaaggaccagcaatgagaatcgtagctctaatgtcaagaaattgccagaaacaatttcagaggaacctgaaatggagggaaagaaaccgaaagccgttcgcgagcttaaggctgtagaaactcttagtattagcagtggagtcaagatgatgaaggcagatgagttgggaaagaacaacagtggctgtgatctatctccacttgctccgccgccacccaaaaagccttccgagtcttggcttttcagtaatctgccgtcagtaagctcaaagatcccttcaccgagatacctgtttcatccccaaaaaaagaatgttgaagaaaactccacaagtgttaccaagtgggaaactatagtcaagacttcttatacgcacagagatcatatacgctattctgaagtaagcatgtaaagttttccctgggagataaagaaacacaatgaggcgataatactaacccttctttgatcttcgctatatcttttgcaggaactcgttgctcattcatcttgccaatcaaaaacttagtggtttgaagctcccttgggatggatcatcacgttgaattacaatttcatcgacgtaagaaaaccgcagtttcttttgtgacccttagaacacttaacacgtaatccctcagattgatttacatgtgtagttatactttcatatctgtgtgttgcctacttaactaataagaagaacaattgttcccagtaaatgctatgttcatatttctatctatacccaattcaaacccaattaactgttggaagttttttcaagctaactgtttccattcaggtgaaggttaccaggactacaaggcagcaaagtctacaggtaacatttacacatttcagtttatcatatagtctctctgatgaagcataaatatgtgttagcttaggatgaacaagacagtgttataggggaaggccgagaaaaaaattccattaagctcgtctctttgtagagatacatgtacaacatattagcaataaacgaaaaactagccatttaatcgccagcaaaaaccgtctaactgccttattaagatctcactcttaatttctttttttctctgatcttcctaatcactctcattacaactctcactttcatatatatacacaaaacaaattaagtatagtaacaaagaatgttaatattcgtttctatgataccttctcttgttatgtcttcttctctcgaccttcctgttttcttaactttgtcactgttcaatttcaggtggcaaacacattacttcttcaacttcatctgcttggtaatgcatcagtttctccagctgtggtctaagttccttgttgcaaaactcttcatactcttctatatttcctcctttcttcttcacttcaaccaccacaagagatggcgtcagctcaaagatctcgactctaattgtcaacggtcctttagctccttctctacaaccttctagcctcacgctccaatccttcttcctcaccataaatttcacctctttggcaatctcttccaatttcgatatgatctttgtcataggagcagcagatacaaaccttgctccttgtccaccttcttcaaacaaacccgaaagatctgagaacgataagatgtcaaatgcgtttagactcgcgggtctcggcattgaatcaacccttttaatatcaaactctgcatctccttctgaagcagtcgatgatcggcctgatgacaatgatgatgaatcgtcatcatcattgtcatcatcctccctacataacttatcgttttcaatatagaatttgacatgtttgaaccctttcttgaaccatctatgcttcatgatctccggtattgtgattcgggtatctggattcgtgtctagcatccgggtcacaagccttgcaagctcaggagaaaaccatttaggacacttaaactgccctttatatatctttgtatacataaccaatatgttcttgtcatcaaatggaagataaccagccatcaatacaaacaagatcactccacaagaccaaatatcggcttttgcaccttcataacctttccttgtcaaaacctcaggcgccaaataagctggtgtcccgcaaaacgtttgacagattccttcttgcttgagctgctccgagacaacgctgagcccaaagtcagagactttcacgttccccttgtcgtccaaaagcagattctcaagcttgagatcgcggtggtaaacaccgcggctgtggcagaaagcaacggatgagatcaactgctggaaatatctcctcgcggttccttctcgaagccgtcctctagccaccgtattataaagctctccgcctcgaacgtactccatcacaatgtaaatctttgtcttcgtagccataacctcgagtaggtgtacaatgtaagggtggcggacacggcggaggattgaaatctcccgtttaatatgaccggccaatccactcttcactatcttctccttgtcaatgactttgatggcaacatcctcgccagaatgaatgttccgtgctaaatagaccttagcgaagcttccgtggccaagaagctttcctatttcgtacttgtccatgagaatagagccttgtggagtccgcggactcctcgggctctctggagtactggtctctttgttcgtattttttgtaacgattcgagcaagaagacccgccatgaattgtattggcgttgggccggggatggccaacggtgtagatagtacttgagccatccgtaggctgagacttttatttagttctggttgctctctaagtgtaaatgtaactgttgtttgttgattccgacacggttttaccgggaaacgaaccaaaacaagaaaatgaaatgaagaaacggacaaaaataagatatggtggggttgttgtttcggttgtgatgttgtcttaacttggcctttttcgtgttcgttttataacagttttcgagttgactttatcttatgtttcgagaagctgaaaagtcatttgattttaaaatattgctatttgatgttgaagttttatcctaatccaaatattttgccaacagaataacacgttggacggattttcaaattataaaaggcaaacttatatgttctatccatacgcaatgtcaactttggaatacatttaagctttcttaaaggacagataataaggttgacttatcaatgaggctgatagataagcagatcatggttcgttaagatgtcatcacacattttatttagcaaatgtataggtttatgtgatacgtgagtattatagtctttaaaaagatactgtatggagtggtatttgtgggcaccacgtgttttgctgagtcggtgcttactgtacattgtggacttcacgttgcagaccaaaaccagtggcttcaaatttaagactccaagtttcactttctccttatttatttttttgataaaaagttttcaattagattatattcatagtttcatacttccaaaatccgttttctgtattttaatttggattacgagactaatcttgagtgcaactttatcatccggaactttattctgaaattggatataatcaattaaattcagcttgtttgtgtacaagcaatagcattcaaatagattcagctaatataccaacacttagactaaattaggagaatatatcatgtcataaattgttcttcagataaaaaatctcaattgatgatagtagtttattcattttaatgcataattacgaatttaaaactctcaagaaaaaaataactacctcagaaagatttccaggaaagcttatgctaaaatatgcaagcacgacggaggtttatcctctttcgtataatttgtgttagtattgtattaagaaatgtataaactaatacaacatctgctgtcaaaaaagaagaagaaagatctaatgcatatataaaaaaaaaaaaaaaaattttaccaaaaaaaaagaaagaataaaagatcgatgtgaagaccactttaagatagtacatttgtttggataaggtgtattacgttaataaataaaatattatctaaaaggaaagattcaaaatttgtaatagttgcaaataaaaaacacaaaatttggtagtaaattaatatgtaagaaactattcagaatatgtagtgtaatgattatggagaaagatacttatcattcatgagaaacaagattaacttatacacacaacacagttcatgaattctaagagacaaccaagaagagatagatacgaagagacaagtgacgagtgaagagtaattagaactctttcctaacaatgatgaattgagttaagttcctatattgttggtcaaaaatgacatccttaagagaaaaggtcaataagttgttagagtcactgcacacaaacacaatgatctgtatccgagtctgattagagatttcaatacattgaacatgacctatgattatgaattgacaattgagtaccagatgagtttacatttacatatgcataaaaagccattgtctaactcatcattatacaaaaagaaaagggttgttgaattatttcttacaatgtgtgatgatagctgatatcagaaaaaaaagatggaagatgttgatccaataatggttttgacccggtcacctaacttaccatggataaattatcactaaattgcatatctaacaagaaaatattacagtttgattccttattgttgagttaataacgcaccatgttcatattaatcattcaccatgcatgcatgcatgcaccacatgttgtaaacaaaatgccaaaaagactaatcacaagtctaatgggcttgggctcacaaacatttttaatcaaatcgtcgaaaatttaaattagcactggacgaaagagatggaggcgaagacagagagacactttctggtttcgaattttgggaccgccggtggtgaagtttcgagtgcgacggagaataagcgagacctgttcggcgattcggcatctggggaatgtactgagagagagaagtttctgggaggagctcaaagttagtcctcttttgctttccgtgtttcaaaatcgctaatctagaatgattatagattgctgttttcgggttttgaggtcattatgatctagattggattctattgaaattgtcttaagttatccagctaggggttttactgttagttccttcattttccctcactgctttgtctttgcaattttctctattgttgtggttctttggattttctgttttttctaggatcatgtgattgaagaggggaaaattgataaggtcctttagtttgaaaaagattgacagatgtgaaatgtgaagttattatatagaagtctagatttcttgttgcatgaagtgaggttccaagataattcgatcagattcggtcttgattcagtaaacatgtatttagaccctcttgagtataatctaagtggcttctgcacatcgctctgcatgttgttgaggaattcatctttgttggtgtataaattgcagagaatgacaaggaaaggagggagcaagaatgcaggacaaaccatcaagctccactttttctatgctggttgctcaacttgggactgttatcaccattcaaagcccattccaggtgtgcactagttacttcctagataaaagaatgtacccttttttgaaaaatttgatagattttgggaatgtgacaatttttacaggatatctaggtttaatcaatggtgggattttcctctataccaatatatactgtggcttgctatgcaatagcaaacaagaaatcgaagtaggataaggttggttatcacagtttaagttttgagtgtgtacaatgagattatgagatggatttttgcataattaagttgtttctttttgtggtgtttgccttcaggtacatgaagaaatcatctcccagctagtactcaagattttctatcttcgttatggtctaatgcagctattcaatcagatgtcattgcttctgcgtaagtctcaatttagtcgttcagttgacaatctcaaagctgctgctagtccgtgccaattaataatagcatccactatttgttttaggagatatctgaacagatagccgagtatttctctaatccatatataatcctttaaaagtcagcttgtgaacttagaagccatttactattccttcccctttagaatgtgagagttatttagtaatagtttagtcactttgtgatatttagacattttacatccaatgtgggatcttataacaagcatgtgttattttgaatcacagatgaaagaggcaggacatgagcaaatcaaaacctttttactcaatcgaccacagccatgacacggcaccgtttttggttcttgtagcagtcaacaggtgaaagagaccagagaggtatgtctgttaacaaaagcattgtgaattttttttgtattgtttatgtcttaaatccaaatatgtgaccccattttggtccatcttgggtcgcacgtgggtgtcccagttagctactctttttacatctgcactgttttggacccatgtcttggctccatgttatttattacttttatttttttgcgccaatgtcattattattcaacccaagataatttttttaataaaataaaaagttcaaagtgaaaaatgaagaaagtaaagcaaaagagatgttaagctattgattcatttttcttttacaaaaacacgtcattttcacacaatcataacgttttcttttacctttttacttaggtttgctttcattatggtctagtcttcataatcgatcatcaagtatattatactaacttttttttcttgacttttgtataaccaatgtatgagaatgtactaggtagaaaacacctttgcaattataaaaatggataatggacgtgaaaactgaaaagaataagaattgggaacactaaatacaaatcaaagacttggctgctatacgattccttcctctatttttctgtgccctttaattaaagactaactaaattcaagaagcttgaaagaagagaagacatgcactgcagaaaacgtaactaatgcattaaagaatctgtgactctctgatgtgtaaagttgagaaaagcattatttaccaacaaaacagtgtaacggtagtattcggttttttggcagttctttaaggggcatttctggtacctaactaaaacttctaacggtcctttttcctaacctttcactatcccattcatatataaatcaataaaaattccttagccatcaccatctccaccactaccaaaaagctttcttctaactcagctgcaacttcgaaaaagagaagctttttcgctttgccttgtcctcatttctctttcacacaacttttctatcttatttaaaaccactctgttcttgttttctcagtcattcctctgattcaatcagattcttttagttttcctgattctttagcagattcatgagctcataagaagaagatttgttgttgagtgttaacccagaaagaaaaaggaagactttagaatcatggatcttgtaaagccagaggagataagtcacccaccaatggatcagcttcagggtttagagtactgtattgactcaaaccctccatggggtacttagccttgaaaccattctctgtactttattggttgacttttcactttccggaatcctgatgatgatcttattgcaggagaagctatagctttaggtttcgagcattacattctggctttaggaactgcagtgatgataccttcaattcttgttcctatgatgggtggagatgatgtgagcattatttcttacattcttcactgtttcttaatccaacgaatctctgttgtgaattttgcttgtctgactgagattaatgttcctcccaaaaacaattgagtagggtgataaagtgagagttgttcagacactactgttccttcaaggtgttaacactcttcttcaaacattatttggaactcgtcttccaactgtcattggaggctcatatgcattcatggttccaatcatttcaatcatccatgactcttctttgacccgtatcgaagatccacaattggtatgtttgttcttctctttgaatagtattctcaagatcctaactccatactaatttgaatctgaaattaaacagagatttctaagtacaatgagagcggtacaaggcgcgatcatagttgcatccagcgttcaaattatcctcggtttcagccaaatgtgggctatctgttcaaggtatatatatacatacatatttcatataaaggtttatagattttaacgagttttcatcttaattttttttcagattctttagtcctattggtatggttcctgttattgcattaacaggttttggactcttcaacagaggattcccagtggtacattactgtcattcctctctttaaacatccaacaatcatcccttttggttcttattttatactgttcgtgttgtttgcaggtgggtaattgtgttgagataggactccccatgcttattctctttgtcatcttctctcaggttattttcctatgggactgatccaattctctttgatactgcatatgtttctttttaactgattttataatctgtgctcttgtgcagtatctgaagaactttcagttcaggcaattcccagtagtggagagatttgctcttattatagcgcttatcatcgtgtgggcttacgcgcatgtcttgaccgccagtggggcttacaaacaccgaccacaccagacacaattaaactgcagaacggatatgtctaacctcatttcatctgctccttggttagttagttcatattctctagatataataaaaaaacattcaatagttgatagtgttttcatatatttatgcttctcttgacttattttaggatcaagattccttatccacttcaatggggagcacctagctttgatgctggtcatgcttttgctatgatggccgctgttttagtctcactcattgaggtaataatgtctctctgtatcagattattactcttgtctcagcatagaatgttctaaaagaattgaaatgtgattagtcaactggagctttcaaagctgctgcacgactggctagcgctacgcctcctccacctcatgttcttagccgtggaataggctggcaaggcattgggatcctcttaaacggtttatttggaacactaagcggttcaagtgtctctgtgtaagtgtaattgtgaatgttttcaaagcattttctccattagttggacaagttagtctcattgatttcttgattgttacaaattctgcagagagaacattggattactaggaagcaccagagttggaagccgcagagttatccaaatctcagcaggatttatgatattcttctcaatgctaggcaaattcggggcattgttcgcttcaatacctttcacgatatttgcagctgtgtactgcgtcttgtttggtcttgttgcttcagttggactctcttttctgcaattcacaaacatgaactctctgagaaatctcttcatcgtcggtgtgtctctcttcttaggattatcgatccccgaatacttcagagatttcagcatgaaagcattacacggcccagctcacaccaatgctggttggttcaatgatttcttgaacacaatcttcttatcttcaccaatggtcgcactgatggtggcagtgttcttggacaacactctggactataaagagaccgcgagagacagaggattgccttggtgggctaagttcagaactttcaaaggagatagcaggaatgaggaattctacactctccctttcaacctcaaccgtttcttccctccttcatagaaagttttactctctttttttttactcagaattgtgttgtttgtgtgtgatttatataatcaccccaagtattatttaatctataagaatcattcttttttctttatctaatggataaccaccacccattaggatcaccataaagatcatattttggagcattccaatatcataacactttactcttaagggtctaatttgagttggtggcaacatgtcatatagacttcagagctgcttccaaaatgggtttccaatctacaccatttattacagattcatttttgcttttcgtatttggttagtttaggagtttagtttttactttttttagattcaggaagtctttaatgggtttcaccggtttagtaggttcacctttatcggccaacaagaattacatttctctctatttatgacgactgccaccaataattcaaaacaagtttacatattaagttttcttaaactactcctatatattaagtctaagattatattaatcttatttatataatttaattcaactaaatttttagtttgtttatttacatgatataccatggtcctgttattttagctaaagtatatattaaatttattacttttttatttcaaagattttttctattgttttttattttgttttcttttcatttaagcttatattattattattatacacacacatttaaggtttatatttatatttcttgcaatgcaaacatgtgtcaatattagttgatttaagatacaaaaatattaaggactaaatggttgagataatactactttgatatatatatatatatatatataactatattctataaacttaatttatttgagagggtaaggattagatgaccaagaaattggtaaaaattggaaaaataattatagacattattattttacaagatattctcaaatggctagagatttgtgaagttctgttttttttttcctcaaagttcaagtgtaatatttttcgatgacaatgattattccaaatttatttttttgttaatcgtaaacagtgaattttgcataattggtttgaattagagttgataatagttgttctcatcatcaccaaacattcttctgcttaccaaaagtaagggactttcattagcaaaaacaaaaatcatacacaaatgggttttggttgtactgtccaaaatggaacacacagttttatagaaagacaaaactgaaacggcaagtgagagttaaagtaaaaggaaattgcaatcgagagccagctgagatttttagatattttgcaggtaactcttaacgccgagcatacatacgtttctcaaagacataaagctgattgtgtttctccatttgctgaaagatctgagccataaagctgaaatagaaaccttttttgtgttttgttgttccccagattctctgacgctgcttaaaccttaaagttcgtagctttttcttgctagtgggtcttttgaggtggatctggattctgggtaaggttttgttttttatatctttaccagtaaattgaagttcttatggtttcaagaaattttacagggttttcaattattggaatgttgtttctgttggctctttatctgaatacaatcttactaagaggttacggatcttggactttgtaggaacttgagcaaaagccatcctcttttgttgtatatatgaattaaatggaccctaaaagttgtgagaattcgagtgatgttaagggtcagaccagtgactctgtatcaaaaaaggtgttgattgaggaagaggaagatgtaaagaaaccacaacagggaaaagaaaatgattcaagaatggccaaagatgttgttagttgcagtagtaacatttcagctcatgttgttcatgaggaagttgcggataatgttactgcggtaagctgcaacgaggcagagagtgatatatcgaaagcaaaggcgaaggagttccacactattgatttgagtggtgtaggagaaagaatctgtaggatttgtcattttggttctgatcaatcacctgaggcttctggtgatgataagtcagtaagtccggagttgattgagattggttgcaaatgtaaaaacgagcttggccttgcacatttccattgcgctgaagcctggttcaagttaagaggaaacaggtaatgaattcaatatcttcgactgttattagcttagtaagagtatggactaatggacaagattcaacattaagtcaaactcggtgcttttgtttggtgttcttggcagtgtgtgtgaaatctgcggttgcacagcgaagaatgttacagtaaggttgatggaggattggagcggcgaaagagacaatacattggatgggagaagaagacgaggaagaggacaatcttgctgcatctttatggtttttctgctcactatccttttgcttcattggtttttcaaaaagattagtggttactaccaaaacacttgaatatgtatatctgttggtaactttatcatttgattctgaatctagattatatggaaaagagatgatagaatcaaaattcttagatcaaattctgattcatagtccaacagatggacaatttagagttttgactgtagattactagattttgactcttaactattagaacaaaaccattttgagacttgttttgcatctctttggagaaggggcaatttcgtacatctattggttatttgcttgtaatcccccacatgggctcattatacgccttatatatgggccaatgtggttaatagaattataggcccatatactaacattgacctcttatattgccgttggactaataaacctattttcatcatttatttttggtccacgccataaacatcctagtttttcgtgagggaaaaattgtttttctagtttcaaaatgaaagatttaaaatcttgagtgaaatatagttacgttgacatgatttacaaattacatattaagtattgactataaggaatggttgatgacactatatttgattttcttagatgtggttctttctttctttcctcgcaatcaatcaacaacaacaagtgcaactcaaaatttgtgaaacaaaaaatataaatcataaaccaacagaagaaagaaagaatctcataagaacagtgatgaaagacgattgtgttactattttgagaatcttgtcgacgattgtgctattcttcgagaaccgtatgagaattttagagagtgtgtgcatgacctcacgtgactcacgcgtttttctcttttttttttcactaggattgaagacacgataacttccataatcaaatggaaatacttatttatatgttctgaagaaggataaaaatatttgtatgaaaggatgaattaaaaaaacattatcataacatagaaacattcaaattaatgcctcgtacttttgagagacactcaccaacagagacctttcatggtagttttagattccaagattgatctaggattcgatctataaaacctgataaccaagaaatataaccataaattgcctagagactataaagaaagatatattgttttgcatgggatgaattgcggggcaaatctcctttggcagagaagcattttacttgcatatctagccaatgcgatctgccataggagtattcgcccagtaatccaaccatacattatctctctgtcttcataaacatgcatcttcactactatttaatatattcttcatatttcacattgcattttgagttattggaagttggactagcaaagtatgtatatatagttgatgaaagtgtttctatatagtgaatgaatgcgtatagaaagcatattctctggcacatcccatgtttcatagagcatatgtgtctagtataatcctaaagaccccttcatgcggtcctcatgcttctgctttcagaagttaccaggctagtaaatggtatattaagttttgtgattcatgttttgataggaaattgttccatagcatatgctctttatatcaaggtttacatatacattacatagtttgagtttatcctttgaagcaataaagtgagagaggaaaactgagattatttcttggtagaaagcattacagggcgaatcctctattggcagtggaagttgatgacccttatatgttattttctcatcattttcctctgccaaaggagatttgcctcgcaatgcttcactaacgttatggggttattcatttctccaatatccaaatctagtagctaatattttcatttaatagtgttatttgaggcagctcatatacttttgtaatttgataattgtaaaagattttactagagcctcttcaaattaactcctttcttttgatttggacgttatctcttcgttagaggctttcacacacatagtcaaagaatgctaaactaatgagaatccgaaaacccaagttccacaatcaagttaaaacgatataacggtttacaaatttttatcataaaatactaagaaatgtaacatgattcattttacaaaataattatcgtaacaaaatggttttaaggatctttaggtttgatctatatcttgtgaaaaccgagaattgattgctaataactatgcatttggacattgatcctcgttggctggtgacatctctcatgattagtatagatcttgctaagtaaaaaacttaaaacggttatctataatctaaagccagtatatattatcttatgtgatttgtcaaatagctaatgatcagttacaatagcatgcaagttttgttttagttggatatacttactgaatatgctgccagtacctgacgcatctaactttgatatttggccttttcaaacctaaatcataaaatctccaaaggtgctacaagaataggatatatacaagcatttttattatttttaaataagtatttgtctatttgaatttatattctacctatggactaattaaaaaataagactttataccacaatggtaaagttgacttaattgtataactgattttatataataacaatattcgtacttaagttttcataaaagtttgaactattttttatgaacaagagaaaaatgtgcacttgccaaaactatacaataaacaatttatgtcttaggttgattggttcataatcatttgtagttgctcgcaaaggctatgtttctgctatgattgggtgctacaatgtttttcttgttaaactcattattttactactatctagcaaaattcaaagtaaataaacttaacattgcaaaaagagaaagttaagaagcaaaagtttgcgagtttttccaaaataaaactctggagaggacaataccatggatcattccatttttagagtataaacctttacaagttgtctttgtcaaactttttggcaagtcaaaagtttaattctcgaatattaatcatcttaaattataaaattatacaaacgtacgtatagagagattttattctagattggaaggatagtgccattgaatatgcttattgcaatgttatatataaacacaacacatataattattgcagtagagagatgaaaaatacatagagaaggtgaatatgcattacagggcaagatcaccattggcagagatctattacttcattcttgcatcatatgcataaatgtttgtggtgagctctctgccaaaggagatttgcccggtaattctcttgcgccaatgttttatattaatttgttggtttttggttagtaagattttaatttttgagtccaagtggacactagttcccttggatcaaactcgtcgaaatcgacgattctaagttctaactttcaagaaaatcattgaacgatatctatcaatgtgtctttgttatgtttcaaagatgttgtattaaaaaagatcgatggtcacaaactctttcctcgtggcgatcagtagatgcatgaaggtaatgaattcttctatatatgcatcaagcgggtcagtgaaacattggttatgtaactaaactttaaaacttaaaaaaaaaaaaacttagctttgtcgactttagcttagtatgtttatgttggatcagaattatgatttgtatgcggcaaagtttatggttggtccattgtttgatcaaaagaccgattccatggccgtggcagaaaccacgcatatgagaattggcttgtcttgatcatggttgtttatttattggaggatttagaatttatggttagaaactggtaaaccgaaatcaatgcttagtgaaccatgactgggttaaattaaagaaagggcaaaatgggaatataaaatataccacatcctatataagtacactgagtaagcggcaattcacaatttgataaaatttcatgcgttagaatttgcaatttagcgagaagcgaaaaagtctgctcctttcgattcttcaggggttttagggtttttctcgactcgagtaagagcgaggatatttcgcgatgttctagattttgggtatttttaatcggaaccctagtttctctgtaatcgaaccatgtctcagtactcagacgacgattattcacatgaagatgactcggagatggaggatgaggacgaagaagacgaatatgaacccagaagtagccgcaaaggaagatcagggaagaaaaggggaagatcaaattcagattccgatggtcggcgagggagtaaaaagaagtcttcgggctccgccttcattgactgggaggttgaggtagatgacgacgtcgaagacgacgatgatgatgtggacgttgaagacggtaagcaacagttgaaatttggggatttttctctttgttgaattccttgattgaattcgaaagttccagtttttattgattttgaagtagaagaatatcacaaagtcatctcctttgactatgaatttgcaggtttcattgtaagtggtgaagctgaccttcctaatgaggattctgatcatcgtaggcaatattaccaacgggggtttcatcctcatgaagaagatgtcgacgagttggaaaagagaactttggaaagattgtctacgaaatatgcaaaggatgattatgagcttgatgatgttaacgacgttgatcaacaagcgcttttgccatcagtccgtgaccctaaactgtggctggtgaaatgtgcggtatgatttctttcttgttatctcttaacttggatgtttgattcaattcagagcactgatgttttacaatggaatcacagattggacgtgaaagagaagttgctgtttgtcttatgcaaaaaatcgtagatagaggatcagagttcaagattagatctgctattgctcttgatcatcttcaaaactatgtatatattgaagcggatatggaagctcatgtgaaagaggtatttttatggtttgtcctgttttcgtagcaatattttgatgttttgactatagtttgatgatatattttcctctgtggtataggctatcaagggcatgcggaatatttatgctaatcagaagattttgcttgtccccataaaagaaatgactgctgttctttctgtcgagagtaaagcaatcgatttatcccgtgactcgtgggttagaatgaaacttgggatatataagggtgatctagctcaggtacgatccatttttcatgtgttttaagtgttcagagttctctgaaacctttctgaaatttaagtttggtacaggtggttgatgttgataatgtacgtaagagggtcacagtcaagttgatcccaagaattgatctgcaggctctagccaataagctggtatacgacctttttatacttaagtgtaacaaatgctgtgtattgtgaaacatacttcttcctatcttatatacttagggtatatgtaggaaggaacagagaatgtcaagaagaaagcttttgctccacctccacgtttcatgaacattgatgaggcaaggtactgttccagacttctggtgaaactatcctatgtttttctaagcaataattgtgttctttggttatgatttatcagtatttgtaacgtgattatagggaacttcacatacgtgttgagcaccggcgtgatccaatgacgggtgactactttgagaatatcggtggaatgcttttcaaagatggttttctttacaagaaagtatcgacgaagtccattgctgctcagaatgtaacaccaaccttcgatgaacttgaaagattcaagagaccaaatgaaaatggggagatcgacttcgttgatgagtcgactttatttgcaaatagaaagaagggtcatttcatgaaaggtgatgcggttattgtgatcaagggggatcttaaaaacttgaagggctggattgagaaagtagatgaagagaatgtccttatcagatcagagatgaaagatcttcctgtaagtatccaaaatcttcatcttttcataaacaacatatttgttgctaaaatgttgtagccagtaaaagactgtattcactgttgcagaatcctattgcggttaatgggagagagctttgtaaatactttgaacctggaaattttgtgaaggttgtgtctggcatccatgaaggaggaactggcatgattgtcaaagttgatcagcatatgcttatcattctgtctgatacaaccaaagaacatgtaaggcatattttgtttaagttgtgtgttaatttctgacaagggtaatataacgcatggggatgatattttatatgtagatttgcgtcttcgctgatcatgttgccaagagtgcagaagtgactaaaggtgtcacaaaaattggggactatgaacttcatgatcttgtgattctaaggtaagttgaatgcgcccaaccacctctaattgatatcatttctatcggtatgatagctttatattacacgatgcagtgactttagctttggagtaatcctaaaacttgatagtgaagctatccaggtaacttaccaatcatacaaatgcctcttatcatgtcaatgctataatgttattatttatttcaagatttgctgtaactccattttatttcagattcttaaaggggttcctgacagctcagaggtctctattgtcaaagccagcgaaataaaatacaaaatttggaagaaaatcaatgtgcaagaccgttacaaaaatgtcgtcgcggtgaaagatgttgtcagggtcattgagggtcctagcaaagtgagttcctttgcagtctggtcgtttttttgttagcaaactctttaaatatcatttgataagtcttataccgatttatatatttgtgatagggtaaacaaggtccagtggtgcaaatctacaaaggagtgttgtttatacatgaccggcataaccttgaacacactggatttatctgcactagatgctcatcttgtgttcttgctggtggcaatttcaagacaccagccctggttcctccatctccaaggagattccaacgggcagacatgggatataaccgtatgtcagatttcttcgtattattttggttctttattcttgactcgtccagtgcatgttaaagaggggcccccctacgtatgacttgtaaataggtttagtctgaaactgttatgcgtaacttagaatgcattcgtttactgcagctggagctggagggagacatcagggtggacgagggagaaggggtgacgatcatttggtaggtacttatgtcaaaattcgtctggggcctttcaagggatatagtgggcgtttagttgaagtcaaagataagctagtgcgtgtggaacttgaggccaagattgtgacaggcaagctccactgtaatttcacttctattcacagctggttgctgaatgttgaatgaattctaactctttttgtatgaacagttgagcggaaggcgatatcagatatgactgataatgtagtcgcaaccccgcagtataatatgggaagccaaactcctatgcatccttcccggactccacttcatccctgtatgactccaatgcggcattctggaggtttgtcaccttaatttcgcagtttcaagatccaatcatttgtttgtgtttttgtttctcatttgacaacatgtttgatatgtttatgtaaaaaattcagctacacctatccatgatggaatgaggacacctatgcgtggtagagcttggaatccttacatgcctatgagtcctcctaggtactttaacatggccactcttcatttattcccataaatatttcacattctgagcaagtgtctcaaaccaaaatatggttgttgtgtctcagggataactgggaagatgggaacccgggatcatggggaacaagtccatatgaagcagctacgcctggatcagattggggtagtagtactcctggtcgtagtagttacagagatgccggaacaccaataaacaatggttttgtctactaccttttatgccttaacggtttcttgctttgacgaatcttattctcacacacttttctcatgcagctaatgccccaagtcctatgacaccaagctcaacttcctacttacctaccacacccggaggacaagcaatgactcctggaaccgatctcgatgtcatgtctcttgatataggtgcctgcctatctcttagttttataccattggtgtttttgattctcatattcttaactctaccaggtggagatgcagaaaccaggttcatacccggtatattggtcaatgtacacaaagctggagaggatagaaatcccggtgttattcgagatgttcttccggtttgtcctctttaaactacacagaagaatgttgtattggagtaaacattttccagtttactgattatgtaagcctctttttcctttgtggtcatcatcaggatggctcctgtgtagtcgcacttggacacagaggtgaaggcgagacgataagagcgacacagaacaaagtgagcctagtttgtccgaagaagaacgaacgtgtgaagattcttggaggcaagtattgtggttcaacagctaaggtcattggtgaggacggtcaggacggtatagttaagctagatgaaagtctcgatatcaagatattgaagctgactatattagccaagttagttcatgagtgaccccattaggatcgtttatattttgctaattaattactctttacataacattcttgagatttatttaattctttgtgactttgcaactttattaacatatatggtttgacgtaatctttcataaacgactcttcttctttctccattttctctcgtctatctacatataaatcttccaaagaagatcacgatcacacaatatttctattgttgtacattactatataaacataggatacatagatgaagtgagctctagaaatgaaatccatggtctcttctcctaaacgaaggtctttataagaaaaacgtcaacataatttcttctcaattcgttcaatgtaaaaccttatcattgtttgtacattctactatgtgtgtttgcagcaagagaatggtgagagtagcgatcaaagtcagaccaatctacgaaccctggagtgcacactaggtgctcgacgaaatgtcccagtgagacttcacttctaaaaataaaaagtgaaattattatttccccaatgaagaagatcacgtgccatgcacctgaccgtttctttatctcttccttctggctcaagttacataaaacgtctctactctgttttcttctcgtaaacagaacagtactctcccaagaaaagctgatactttttttctcttttctttctcagtctctcatgaaagacaaagaaaccaccaccattttctcgagaaaattctgactcccttggatacgatgatgatgaagagtacagacgaaagtgaaacaaaatggaagatcgacgatgcagccgaacttgctagagacttctggctcgaacgtgacggcatttcggctttgaaattaacagagaaaacgatttctgatcatgggaatcacgaaaagtgctctagtcaccacgaactgcaaggtgatatcttctatgcccaagcgaagaaaacagatgacaccgacctcaaatgcttatacttgtttgcttctgtcgatgcgtattcaatggctactcttctgtctcctaacgctttgactttgaggtcctttcgtggctatgctcgttcgctaatcaagttgggtgatcagcttcggataaacaagttttatgagaaagctgtgtccaaagcaaagctgggaatgtccataacgtcacctcaaggaaagtctacggatggtggctattttaccaagataaagacagaacttcagaattggatagatcttgcaacaacgaagatgcaggcgactgtggctgtttctgatataggtactatggataatcagaaagaacctggggaagaagatacttcttttgatagattgaagaagatttgggttaaattggatgacaagaccaaaataaactttttggtagtagactttgaaaagcttataggctatatacaagataagcatgggacggaagtaaaagagcactttcagaaatgtatacccatcgccaataatcttcgatggagatgttggaagtgccacatttgttctcaggttaactactgttttacggattgcaagatgcacatcttagataatcatgtgcacaactctgaacctgactttagtgctcgtcctaagtgtgtggatgagattttggctgacatgatatgctgtggggattggaagcctgtggatacagcggaggcagaaaatcttatcaaggatagagctaagcgcggggaagagtttgtttatgttaatgggtggtgtagtgattggcctgaagcgaaagatcgcgagcgggaaaacgtactcaaacagtttgccgaggttctaaaatcttcttgtgccaaggagaattgtactctttcatgtaccctttgggactggttgagagattacacagaagagaatctggaactacctggagttcctgggatctatcttgatcaatgttgcttctttaagaaccctcaatgcatctgcttcttagatcttaagcaccttgaacacatcctcaagtattttagacagctcaccacagatgttcgcgcgagtttagttccaaaagtagtgaatcagttttgggaaaattcccaggtcaaggaaagaatcgaccttgagggagtagctacttataatctgcttctggacaagagactgctgtatgaagaagagcttgaatcggataagatagggacagtagagcattataaatctacagggatttttgaggatgtaatgcctaagggtgataaaatcgtctcttggattcttgactgcccagaaatcgatcgggaatttgtgtctcaaatggcaaacggcgtacacaatagtaagctatggttagcagctttgagaatagtacggtgtgtgattaggaaaaaggaaagctactatgataagagacggaagatgctaacctatgagaagatgttgggtgaggctgagacgatttgtgacagagaagacactaggaagaatgttaatcagcggagcacatatgagtctgcacttcgaatgaaatgtgaggatcttgtaggtaagcaagatgatgatacaaaatgtttcttgagtgttgtaagagatgtttttgaaagacaaagctctccgagctttgaagtattcgaagataagaagtgtatatccgaactctcttctactgtcccgaatgatgatgtgaaaaaaagtctgttaacgctaaggaaatcactgaaagagaaggtattcttcttcctcttctttcttgttattcatatgaacaagatttgatctgtgatggctgatatgaggtgtttctttttcgcagttccctttgattgattcaaagattttgcagaacaaatctacgtacgaaaagctaatagatgtattcccgaagctatcagcagttgagtatcgcttggtggtccttccattcgtgaagaagttcttacaggtttgtcgacttgtggattttattaatcaaagatcattcacttaattccaatttaacacatttgttttctggcaggataaactgaagaaaatgatgaaaacaaacagcagttcagttgctgcaggagattctgctgaacggaaacctaagaagagacatctttgaaatctgttgttgttttgctgttgttttttgagttaaagtgagttgactatctgatgcagggatttttttttggaggatcattcttgcagatggagacaaactttttgagtattagttgtctagaaacagtcttttatgttctcggaaaatcttttggatccgagagaaacatggtgtgagaatttgtagtttgttttaggatcagatgcatatatgtttgtgtgtctggagagattgagaaaaactgggacatagatacaatggaaagctcttgttgatattcacaggctttgtcaaatttatcaggaaagtggtgaaaacacattttttacaaattgttaggaagtcaatttctctctaatccaaaagaaaaccctcttacttcactaatccaagattagttgtctcactttatcaacgaaaaaacattccaaaattgcacacacagagacattcaatgaactattttctctcatagttcaacacaaatttttacatcaaagatcaaaacttcaaacgctatttgagcaatggctccgcctctttctaggcctcacctccgcttccgtcttctcgacttcttcgtcggtgatcacatcaagaaagctttcagagacaaagaaatatgaaatgttggtaacggtgagagaggatgagaaaaaccttacttggaaaatgatcatggtatacttctactatgtgtttgtcttgcagcgagagatacatagagaagagagtagtgagaggtacgattcaaagttcggaggttaatctacgaagcctggagcgcacgctaggtgctcgacgaaatgtcacactgagagtttggtcttttgaaaaacttattacgcaatgaagatcacgtgccttgcacatgaccgtctctttatctccctcaacagctgtatatcaacgcctcgactctgttttttcctcgtaaacagaaacagaaccaatacacttccaagaaaaagctttctcttttctttctcactctcccatttccttggaccttaaagaaacccatcattttctcgagaaaactttgactacctgcgttcgaatgatgaagaatccagagaaaaaatatgacaaagaaacaaaaaaggagattgacgatgaatacaatctcgccaaaggctactggaaaaaaggtaaccgtattgaagccttgatgttaaccgagaaaacgatttcagatcaggggaagaacgaatcttcctgctatgttcaccacgaactgcaaggtgatatcttttatcaactagcagaagaaacagagatcaccaacgacatcaaacgtgtatacttgtttgcttctctcgatgcgttttcaatgtttactcttccgtgtcatgacgctttgaagtcctttcgtggttgtgttctttcgctaatccagttgggtgatcagcttgggataaagaagttttataggaaagctgcgtcgaaagcatatcaggcattgtccgtaacgaattcctcagagaaatataccgctttgaacaaagaatttgatgggtggtatggatacgcagaagagaagaagaaggagaagaatagcaatgcggttgtgactgtttctgagacaagtactatggctaatcagatggtattgaaaaagaaaaatccttttcaacaattgaaattcttttgggttaatttggatgacaagactaaaagggattttttggtagtagactttcgaaagcttattgaatatattcagaatgagtatggcaaggaagtaaaacgatattttcggaaatgtgtaatcagcctcatatcacttcattggagatactggaagtgccacatttgttctcaggttaactactgttttacagattgcaagatgcacatcttagataagcatgtgcacaaatatgaacccgagttcagtgatcgtcctaagtatgtggatgagattttggctgacatgatatgctgtggggattggaagccagtggatatagcgcaggcagcaaatctgattaatgatagaattaagagccagaaagagtttgtttatgttaatggatggtgtagtgattggcctgtagcgggtgatgaaaagcgggaaaccattctcaaacagttttctgaggttcttaaagcttcttgccctagggagaattgtactctttcatgtaccctttgggactggttgatcgattacacagaagagcatctggatctacctggagtttccgggagctatcttgataaatgtagcttctttaagaaccctcagtgcatctgcttcttagatcttaagcaccttaaacacatcctcaaaaaatttagccagctcaccactgatgtccgcgaaagtttggtttcaaaagtagtgaatcagctctgggaaaattccctggtcaaggaaagactcgatcttgagggacacactaattctaatctgcttctggataagagactgctgtgtgaagaagagcttgaattggatcagaatgagacagtagagcattatgaatccactggcatttatgaggatgtgatgcctaagggtgataagatagtctcttggattcttgactgcccaaaaatcgataaggaatttatgtctcaaatggcaaaggtggcaaagggcttacacaatcgtgagatatggttagcagttttgagaatcgtacagggcctggttaggaaaaaggaaagctactatgataagcgacggaagatgctaagctatgagaagatgttgtgtgaggttgagaccatttgtgacagagaagacactaggaagaatgttaatcagcggagcacatatgagtttgcgcttcgaacggaatgtgagaagcttgtaggtaagcaagatgataatagaaaatatttctggactgttgtaaaagatgtttttgtaaaactatgccctccagtatttggcgtattagaagatatggagtgtatatccaaactctctgctactgtctcaaatgatgaagttaagaaaagtatgttgaggttaaggaaatcgttgaaagagatggtattcttcttcctcttctttctttttatatattcatttcaacaggatttgatctgtgacggctgatatgaggtgttttttttttgttttggagttccttttgattgattcaaagattttgcggaacgaatgcacatacaaaaagctaatagatgtattcccaaagctatcagttgttgagtatcgcttggtggtccttccgcttgtgaagaagttcttacaggtttgtcaacttcaaagaccagtcactgactcactggtgttggattaaatcttattgccagtttaacttaatttgttttctggcaggataaactgaaaaagatgatggaaacaaatagcaattcagttgctgcaggagattctgtcaacatgcagggctaagatttttggaggatcattcttccagatggagaaaaactttagagtactacttgtttagaaaacagtcttttaatgttctcggaaaaacttttggattggagagaaaaactgtatatgaaaatttgtagtttgttttaggatcagatgcatatatgtttgtattgtatgtgacaatagacacaatacaatgcattgttgatcttcataaactttggtctataacttcttgagacatggtcatagcagataaatttagtaggttggtcacacttttacttcactaacccaaagattatagtaatttcaacagattgattgtcatataaccaacattccaaaattgtacctaaactcgtcttccctttataaagggtttattggcaaagtagacactttttcaaaaataatttgcaaagtaggtagtttttttagaaattagagatatagacattttttttgctttttgtgagatagaggatatgtctaatagactaaaaaacaaaatacatatcaaatactataataccttttatcttgagagagaataaaaataatatgagagaccatgtttactttattttatttgtctttatctttttaatttttattttagttttcttaaataatttttaaaaaaaattacgttgacttttagagtatttatatgtcatcaatttaatacacaaacatttcaaagatcgttttgtacactaaacattattcattggtgtacaaatgtgtataccgatattcataaatagaagtaatattgtttttaatattttacaaatataatgattgcataaaccaaatattattacttaatataatggtgtacatgatggtgtacatgattaagttaatcttgatggtgtacaaaatgaatgaaactattatgacgattgaatagaatgtgtatataacttttaaatgatagcatacaatattggtaaacaaagtgtacaaaacttggtgtacacttacagggaatgtataaattattatttcagttagtggtgtacgtcatctcgtacaccaattttagtacactgtctcatagatctttagaggtgtacgatcatgtacaccatattttcaatcatctatgtacatcattttgtatactattatactcactctatcacttcttacaataatattatatattgatttttacattattgtcgtacactaatatttgtacaccagtattaataatatcacgtacactgtcggctgggattaaataaaaaaatgctacatatttttgaaatatagcaaaattagtctttttagattcacataaaaaatttaaaagtcaatatgattatatggtaattttttatgaagaattattatcaaacaaagtaaaaatattaagtaaaaagaaaaataagaaaaagtaaaatttgacttgaattttgtctttatcttactacataacaaaataacaaaaggttatataagtcatttctaaaatctctattagacaaaaagttgtattagagagaaaagagaaaattgtttatttcttttatttctataaaaactacctactttgcaaattatttgttgaaaaagtgtctactttccgacttatctcttctataaataaacagacaacacacagagagacattcaacttcaagggacgattttcctctcatagcaacaaaacaaatcacctcaaagataaaaacttggaacataaaccaacgaaatggctccgtctaatgatcatttgcctttttctagtcctcacctccgcttcattcttctagaattcttcacctaagaaagctttcagagacgaggaaatatgaaatgtaccattttataccgtcctactaaatgtgtctgtctcttacagcaagagatccgttccgtagagaaaagactggtgagaggtggtacagttcaaaggctgagattaatctacgaagcctggagcgcacgctaggtgctcgacgaaatgccacactgagaggtcatcacgtgccatgcacatgaccatttctttatctccctcttgctcagccaacagttgtatataaacgcatctactctgttttcttctcgtgaacagaacaattctctcccaagaaaagctaacaactttttctttctcagtcaaagccaaagaaaccaaccattttctcgagaaaattctgactcccctggggtacgatgatgacgaagagttcagatgaaagtgacgacagtgaaacaataaagaagatcgaggaagcagccgaacttgccagagactttttagaaagaggtgaacgcattaaggctttggagttaaccgagaaaacgatttctgatcataggaatcacgaaagttgcttttctcaccacgaactgcaaggtgataccttttttgcgctagcctatgaaacagataacaccgacgtcaaatgcgtatacttgtttgcttctgtcgatgcatattcagtgtctattcttctgtgtcctgacgctttgaggtcctttcgtggctatgctcgttcgatgatccagttgggtgatcagcttcggataaacaagttttataagaaagctgcgaccaaagcaaaatggggagtgttagttacgcaacctcaaggaccgtggacatccctattaggctatagtgaaagcttgaagacagaactttatacgttcatagatcttgcaacaaagaagatgcatgcggctgtgactgtttccgatacaggtactttggctaatcggatggtaacgataaagaaagatccttcttttgatctattgaagaccttttgggttaatctggatgacaagaccaaaagagaacttttggtggtagattctagaaagcttatagactatgtagagaataagtatgttgacaaagtgaaagaagattttgggaaatgtgtatccgttgccaataatcttcgatggagatactggaagtgccacatttgttctcaggtatactactgttttacagattgccagaggcacatcttagataaccatgtgcaaaaatttgtacccgatcccagtgctcgtcctaagtgtgtggataaggtattagctgacatgatatgttgtgggaaatgggagcctgtgaatacagtagcggcagcaaatctgatcaaggatagagctaagcgcggggaagagtttgtttatgttaatggatggtgtagtgattggcctgaagctaaggatgaagagcggagtaaaatactcaaacagtttgctcaggttcttaaatcttcttgtaatgaaaatgatactctttcatgtaccctttgggactcgttgatatattacacagaaaggaatctgcaactacttgaagttcctgggagctatcttgataaatgtagcttctttaagaaccctcagtgcatctgcttcttagatcttaagcaccttgaacacatcctcaactattttagacagctcaccacagatgtccgcgcgagtttagttccaaaagtagtgaataggttctgggaaaattcccgggtcaaggaaacaatcggtattgagcgacttacatctaatctgcttcttgatgggagactgctgtgtgaagaagagcatcattttgatgacacagggagtgtagagacttttaagtccagtggaatttatgagcatgtgatacctgagggggacaagatggtctcctgggttctcgactgcccagaaatggatgagaaacttgtgtctcaaatgggagagggcgtacacaattttgagatatgttagcagctctgagaatagtaaggggcatggttaggaaaaaggaaagctactatgataagagacatagaatggtaacctatgataagatgttgggtgaggctgaaaccatttgtaacagagaagacaataggaagaatgttaatcagcggagcacatatgcgtcagcgctgcgaatgaagtgtgaggagcttgtagtgatacaagatgatgataccaaatgtttcttgaatgttgtaagagatgttcttgaaagagcaccttctccaaaatatgaagtattaaccgacaaagagtatatggagagtatatctgggctatctactgctgttcaaaatgacattgttataaaaagtctgtggaagctacgaaaatttctgacaaagaaggtatgtattcttcgtcttcgtttctttctactcattataacatgttttgacctgtggctactgataaaaataagaaatcttgggtattttttgcagttccatttgattgattcaaagatattgctgaacgaatttacacaaggagagctacatgaattcccaaagctatcagcaattgagtatcgcatggtggtccttccgtttgtgaaaaagtttttacaggtttatcaacttacggaaattatcaatcacagggaactcacttggtgtttgttacttaattccaacacaacataatttgttcttctcgcagggtaaactgaagaaaatgatcatgaaaactaaagaagatgacttcagttactgaactagaagctaagaagagagctctgtaaaagaggtaaaaatctaatgaatcctatcaacagttgttgttttggtgttgttctttgggttaaatttagttgtgttttttatgcagggctacaatttttgaggatcattcttgcagatgaagaagataaacttcgagtaggagttgtttagaaaacagtcttttatgttctcgggaaaactttgtacccgagagaaaactagtctgaaaagttctagtttgttttaggatctgatgcatatacgtttgtgtgtctcaagagagattgagaaacacattgagaagtggtgagaacacatttttatcaaagtgaaaattgtaaaatgcctcttaaaattgttgccgtccaaaaaacagacgttaggtggtcgtttagatttgactaattgtttatgtcgacaccaaatccaaagcccatttgacccgccttacaaaacaaaacatcggcccaatctgtgtccccaaaaaaaaaaaacttaaagcagacgtggcagaccctgattcgttacactatcgtgtcgagcatatttttctcgcgtcgccacgatttggcaataccctgagaaataaataaaaatcgaaaatggattataaggtgaccttcgtctttggttgaccatcaaaaactacaacgctctttctccgtaggaaaggggaagcaaataaattatcgaagcccactggtttcggagctgatcggtctctatttctctcttcatacatatctcgtaagcttctcctccctcttttatcttcttccaatctcctcaattgctttctcctttaatgttttcgtttctccaatcgttatttgtgagtcttttctattcagatctgtgtgattgttgatctctgttcttagatctgtttcgcgttttctagatatcgaatttctatgtatgtaatacgatgtagatcggatgcgttattgtagatctggtttttttggatcgactgagtcaaaaatgattgactcagtttacgaaattgttcagttacttagctgcgaaaactgtgattcgtgaattttgtagctagattatgaatgtggttgcatgcgtttggatttattgagcttacttggaagtgatttgtgatttattattacagaagcagataaagttgatcggatactagaatgggaggaggatttagagttttgcatttggtgaggccattcttggcttttctgcctgaggttcagagtgctgataggaaggttccattcagagagaaggttatctacactgtcatctctctcttcatctttcttgtctgcagtcagcttcctctttatggaatccattccaccaccggtgcggatccattctattggatgcgtgtcattcttgcgtccaaccgtggaactgtcatggagctcggtattactcctattgttacatctggacttgtgatgcaactcttggctggttccaagattattgaggttgacaacaatgttcgtgaggatcgtgccctcttgtaagtgttttcgtttcccattatgaagtattggcattacaatacgtgtttggttgaactgtttcaatgtctggtttgaattgattgagctgtttttggaaaaccctaaggttgtggtcgtgtgagttcttattctgtgtttgtacttattttgtaggaatggtgctcagaagcttctaggtattctgattgccattggtgaggctgttgcatatgttctttctggaatgtatggtcccgttggacagcttggtgttggaaatgccattctgatcatccttcagcttttctttgctggaatcattgttatctgccttgatgaactccttcagaagggatatggtctcggatcaggaatctcccttttcattgccaccaacatttggtaggtcaacttcttcctcactttaaaaaatccaaaatccttttcggtatattgaactcataagagtttatattgatgttctgcagtgaaagcattatctggaaggcatttagcccaactaccatcaacaccgggcgtggagctgagtttgaaggtgctgttattgcactgttccatatgctgataaccaagtccaacaaggttgcggctctccgccaagctttctaccggcaaaaccttccaaatgttaccaacttgcttgccacagtcttgatcttcctgattgtgatctacttccaaggtttccgtgtggttttgcctgtgagatcaaagaatgcccgtggacaacagggttcttacccaatcaagctgttctacacctctaacatgcccatcatcctccaatccgccctcgtctcaaatctttacttcatttctcaggtacagccattctttccacttcactgtatgggacgtatctccacaataacatattgttgacattgaattttcctcgtggtcaacagcttctctaccggaagttcagcggaaatttctttgtaaaccttttgggacaatggaaagaatctgagtacagtggacaatctattccagttagtggtctggcttacctcatcacagctccagcaaggtaatgcagcagtgtctttcattattcgttttaatcaattcaaagttggcatgcatcaactgagcttgatgaatatatgttactatgtggttgcagtttctctgacatggcagctcacccgttccatgcactgttctacatcgtcttcatgctcactgcttgtgctcttttctcaaagacatggattgaagtctctggatcttctgctagggatgtagctaagcagctaaaggtaataaaatcataacagcttgatgtatataacctgaatgttaacatggtgttggatctctgactctgaaaattaaatgtcacaggaacaacaaatggtgatgccaggacacagagaatcaaacttacagaaggaactgaacagatacatcccaacagcagcagcttttggaggagtttgtatcggtgcacttaccgttttggctgatttcatgggagccatcgggtcgggaaccggaattctgttggcggtcacgatcatataccagtatttcgagacctttgagaaggaaaaagccagtgaactcggcttcttcgggttctaagttagcttaaagaaggtgtaaactttgcctgaggcaaaaaagcagagcagaagaggctttagcttctgtgcccacctcaaacacagacaatttgtggtggcacttgggttagactacttttttttgttgttgttgaaacgaaattttctctttagtcatttatgtttttttgttactttttacaagttaaaaaacttatgtgatagacgcttttctaatgtatgtttctaggaatttcactctttgacccaaataaacaaatttacagttttgaatacaaagcaatttattatcttcttggttccagccaatgtgaaatgtttttcgtagcatactttgcattacatgcaagcccaaatggtgaaactagagaaacctccaacagtatggtgaaagtatacaaccctcaatgtggaacgatatggttatgagtaattgatctcaactactagctaatgcagagattggtaagtgtgactaattatgatccgttacagtgttacatactgctctttaatttcggcattcataacaacaaagattttttttgagatttttgccaaacgcgttttacaaatctttttgctcataaacttcttctttgttcttcacactcgcaaataaatttggtgtcgctgttctacacagtccaactctaaacacagatatgatatcttaggggtctttgatttgacgagccacactaattttgtagccatccatcgtcaagccacggaggcaatattcgcatccttacgacggaggagctcgcagtcactggaggcatttttgacaacaaccgttaatctctccggcgtcccgctaattcaaaccctagcttcaatttcaacagagctcgtctcgtgctttatctcttcctccaccgttccaaatttcaaagagactccaaacttgacctacctcaaattcatttgcaactcttgatatttcttgagaacgagagatggtattagttcttttgccaccgacgagaagagaataaagctttgagctcgtagcgttctctaggctaaacttttaaaaacactctccataaaaacttaacaagagaagaatggtgaagtaacgtggatatcagaataggcaagaaaaaaccaattataacttaataagaaaaagggtcctaatagcaaaattagaaaatagaggagcccaaaaccctagtcaaaatagatccgagggtcttaattgcaaaattaaaaaacagaggatctctcgaaaaaccttaaaccctactctcaagtctcaattcggcgcgacggactctttgttcacttttgtaattaagattctcttgtagtgtatatggagatcgatttgggagctaacgcgtttggtatcgacttccatccatcgacgaatctagtagctgctggtctcatcgatggccacttgcatctgtaattccttctaaagcccttctctttgcttcttcctttcgttttccacattcccaagaatcatcaacaatctatgtaatctccaaatttttctcttgcagataccgatacgactcagattcttcacttgtcaggtatcaaaacgctcttttcatctccaaagtttgtctctttcgttgactggacagactaagaagagaatcgctgaaatttgtgtagggaacgtaaagttcgtgcccataaggagtcttgtagagctgttcggttcattgatgatggccaaagtttgttcctttaaacttcaactatctgagctcaatatctgagctatgttttacattatatgtttttttgttgggttttaggaatcgtcactgcttcagctgattgttcaattctagcaactgatgtagagactggtgcgcaggttgcacatcttgagaatgctcacgagtatgcaattattccctttcgttttttaaattggatacatctttagctgactcgttattgtttattgattgataatgtttcgctttgtttactctagggatgctgttaatactttgattaatgttactgagacaactatcgcttcaggagatgataaaggctgcgttaaggtctgttacattctctttcgtctttaatcacttttaaattgtatagcaactataatccaactcactctgatgctatctctctaatttttgtgactgaagaattaagatctgtgttccttagtatttttagatgtgtcatgtgtgtgtgtcttcagcctcaagaacttagttattccctacctgaagattctttacccaatttttatttggtgcattactcatttggagtgaaattatgtgctttgttttctgacactgtatgttcatctcctcagatttgggatacaagacagcgctcttgctctcatgagtttaatgcacacgaggattacatttctggcatgacctttgcatctgattcaatgaagctagtggtaacaaggtttggatttttgtagttatctgattcgatgaagctagtgtcttttgagttttcatagaagacttttctgcttatttgttattttggtttctttgacactgtttagtggagacgggactttgtctgtctgtaatcttagaacgagtaaggtccaatctcagtccgaattttctgaagatgaactactttctgttgttataatgaaggtaattccattatattcctgtgtgattatccactaatttatctatcaaacagaaaagtgtttatagtcaggatgtgtcatcccaagctctttttgtttccacttatgtaatgtatgtattattgtatgctcttacctgattgatttcagaatggccgtaaagttatctgtggaactcagaatggtactctcttgttgtattcatggggatttttcaaggattgcaggtatgtcatatatctctaacagtacctatgtcaaaggtttaaggcattggaaaattgtatgtattgacaccaaactgtctgaaatgtttttcctatttacagcgatcggtttgttgatctcgctccaaattccgttgatgctctactgaaggtgagatgatacactttttttgttttgcatatggttgctgtaacattaggggcccactgactaatggaggccttgtggatttattctgtagctcgatgaggacagacttatcactggatgtgataatggaataattaggtaacaaaaaaaactctgcttccatgggagaaagctctttactggtatcttcacttatttcaatcaaattttatttacatgtgtctccagccttgttggaatactgcccaacagaatcatacagccgattgggtcacacgactaccctatcgaagatctcggtatttagcattcccttctctatatctaaagaacattttatctatgttgactattgtactttgttttgatcgaacttctattttttctgttaaaaatctctcttacagctctctcgcatgataagaaatttctcggtagcacagctcatgacagtatgctgaaggtatcatctattctctctaaactcaagctcttactgtaatgatttacatgtttgtgttcttggtgatgaagttgtggaacctagaagagattctagaaggttctaatgtcaactctgggaatgcatctggagctgcagaagacagtgacagcgacaatgatgggatggaccttgacaatgatccttccaagtcttccaaaggtaaagagaaacctgcaaaactttttggaacatcttaaacagttccttgagatgataactacaaccatgatctgatctcgagtgttttttggctttacaggcagcaagaggaaaacaaaaagtaaagcgaatacgctgaacgctacaaataatttctttgcagacttatagattttgtttcagattcagtctggatagtatatcagtttcatacctgaattgtctacttgattctgacagtttgttaaaaattttggtttttagtaagattgtgttttgcaaaatatctaacaaaacaaaaatcaagtcacagtatgcaacaaaacagagtgaattcatagtggctacaaggatctgttcttatgtatccagtggtttcaccaaaaaaaacaaaaaagagagagagaaaggtgccaaaatgtgttgtcagtacatgagttgtcctcttccttgtagatcacgtaacgaacaaaaaagaagcaacactctttctcctactctgaaacttatgattcaaacccgaaaacgaacaacttacagagcgtatagacgatttgttgacttgaaaccacagcttccaagtgtcttgctgcttcaacatacttccagaaagactcaccccaacacttgttcagctctgcattcactttcgcccagaagatagtctcagttctctccttcattagcaaactctgttttcctttatgcttcaacttaagagatcgtcccttcatcagaacaacaatggtactttccacaaatttcacatccctaacgcatcgaagaagctgatcatttgtagcaatcaaatctctctccgtaagaacatttctcgaaagattcatggctagcaattgtaagatgaagattgcttcagaaattcttgtaagaatatcatctccgatcctatcttcttcgagaatatgttgacgatgatgatcattgccactctcctccacaacaacagaggctgcgaactcttcggccttgtagagaagatagtccaacaagtacattaaagcagattgtttctcgtaagactcatcaaagatccaatctcttagcaacaactgtttctctctgtcgttcttcttaacacgcaataacgtgagtttgatgagcgcatgagttaacctgatcccaagagaaagtacttcatctttagcctctgtaaaaccccatttcattgaagaagatgatgattccttttgcaaagccttgtggaaccgagtcttagtcctactggctgcaattttgaatatctctctaacatctgattcttggttgcgtttgacgattctttctctgtgttcttcagcgttacgcacaagacccattaaacgagagactctgtttccaagaggctcaagaagattcatcagtttcatcagtttcatcagcttaataacctctttctccaaagatcgtgtttcatcttctgggacgatgatttccgttgaaatcgctatggatagcagtgattcataggcagtctttagaaatatcgtcatgatttcacgctctatctgactcttaaaatcatcaaagatgttcattaacggtggcgcagtttcttctttttctgtacagtagaagtttctctccggaggatctcgaccattcttcaccattttcgttacgggaaagaaacaagatgagtgcgagtgcgagagagaaaatgaaagagcaagaaacaaagaatcttaaatgcagagttactctgtttcttttgggccttttaactgcttttattttggcgatattaaactaacaaaagaattaaaaacaatcaatttgaaccgtcagctctactccacgcacgcaagatgatatatgtttttgctaagatgagagcaaagcgaacacaatagaataaattgtggaatctgcatatacaaatccaaatgtatcagaaaaaataaaatagaaaaatggatcaattcaatagtaggagaaacaacaccatatataagaaagatgaaatttacgtaaacaattaaacatctctagcatgcataattagtaggaggtgaaccaattgagattattaaaactttgaaattacaatgttttggaaaactaaaaagcattacaaaatagagattaaactctggaaataacaaagagggagtgcagtagtaggggaaaaaaatctgtaatcaaattcataagattttgttttgggatcatgtgttagcaattgatccccgtattcaggttcacaaaacaacaacttgtctttgtcaaaaactcctagtggtctgagtgcgaatccattactcccaaacaaagaagaagttatattgagatctatggaatatatttccttccatgtcttgtgatctgaatccaacgaccatatcacttggttgggccacattttttctgatacgcacaaacgatcatcaaggttgcacatgatcaactctctactagagtagtcgtggtggtggagaaagggagctttagacacgacttggaaagtttcggcatgaagatcgaaagacaaaacattggtggtttcaccctcagtgagccaatgaagtgacccatctacatatacaggatcttggtaaggaagtatccggtagggggacgccgggacaacaaacctccaagccttggtggtaaaatcaaaaacttcacaaaaagtactagtgttgttgttgccttgacaaatcatactaatgttgtttttgtcttcgtcgtcgtagtcctcgtcgtcatcgttaaggccgcctaattcagcagaattatataaccaaactggcttgtatgtgccattgattttgtctttaccgaatccaagcttagcccatgatactgaaccgacctggtgttcataacgatcgagtcgttgaaaggtagaaagagggaattctcgatgccatcgagtggtgggattaacaacaatattcgaagcataggtattgtagaggcatatcaggccgtcacagctactctggcaaactttgtacaatgtgtcttcccaaggagtaaggatcctaacagaaactgatgaacccagtaccaacgttctcataacttgatgcactcttttaagaagataaaattcatcagctacggataccaaaaggacatctggattacatgattgcctacgatgcatcagttgtctttcttggaaagcacggcatcggattgtagatctccattgcttcgatacggacttgcagttgagcaaggatttcacatcaagtctctccagaatatgctccacaacatcgtagggtagcaagtccatattatgtctttgtctctaaatctgaatgatgaagagaggggagtccaaatatcctttatttatacacaacatatcccaatcccaatccaactaggaaagaaaaaaaaaaaaggaaactaaatctcaagttgtttctgaataaatataacatcagataattacgagaatttatatttatcccaactattttaaattggtttaaggtctagcatttatcccaactattttaaattggtttaaggttaaagggtttcagagatcaatgttatttgtgttattgatcacgttgagctgagtgcaacttaaatagagagagcttacaacaaacatcgaaaatctaggaaggaaagatcttaaatctatctctagctatacaaaatcagtatctgttaagagtatattcgcagacatatagaacacgtgatgaccagacataaccggcacataaccggcctccaataaaggtctagcatttatcccagtttcagacgaaagtgactttataactttatttgctatcataagaacaaaacaaaactcatcttgtatacattttgagagctaactcatcttgggtacttcatccgtacccatctctatacccgtatcagtgttgtgatctttatatacatatatatgcacataagccttagagaataatgttaatggggaagatataagagttttgttaagcgacgtttatgtattgcctataatactatgatattctgtgatgtatctatgttgttaatctgacgcattttaagatataatcgagacaaattcaatcaattttttgttaagttaaacaacatgaatctacctgaaactgaagagtgataaagaaaaggttgaagttataaaaggtgcacaaaaaacttgttcagatacattcaaaccaactatcatcagagtcactgatataccaaaaactattacggaatactactaattaatcaatatcagtataatcatcaggtctcgagggctctcgcagagctcatcaacttcaaattaacccatactcctaatttccgaaagcatctgtctaagtttcttcagttgcagggtgaaatcattccgattatcaatcttctaaagctttgtcaacttattgacatctcaacgaaagaagctttgtctcaacaatgtcaacgcgtctttcctctcatctggttcaggcgcaaagcaggtcatgagaaagagttttgcatcacaaggaagattaggcggaaacaatggctcgtaacacttcatgagatcttctagttcatagttagtatgccaccatggtctcttcccagtgtacatctccaacacaacacatcccaacgaccataagtcaagtcctttccctatctccccgtgagagatagactccggcgacatatagatcggtgttcccgcatacgatttaagaggatgccaccacgtagtgtctccatctcttttcgacaacccaaaatcagaaatcttcaatttgagatcgcagacagaaccagggaaaacaaggatgttctcgggtttgagatcgcagtgaacatagccgtgtctgtgaattgtggctaaaccctcgagaagcatacgagtaaactttctgatcatcggatcaggcaattttttgtcgttgaatcggtccatgaaatcgctcaagcttcctccggctgcgtactccataggaatcgtgtactctacgtaacccttgtcgttaagtctctgttctactccgctaccgtagcattggacgattctcgagcaacccttgaatttagacagaatctgaaactcttcgtagagagacttagcatcgtcagaggttttcacggcggcgtagagagtctcaacgtcgcatcgtcttttataactgaaaaggctcaccgatccaaacgaaccttcccccagatacctttcgaactccattgcaaatagaacgattgattcttttgatagcttttggcaacaaaaccctaattgactgaaatatctgagaatttgtaatagcttggaaaccaaatctcaagttgtttctgaataaatataacatcagataattacgagaatttatatttatcccaacattttaaattggtttaaggtctatcatttatcccaactattttaaattggtttaaggtctagcatttatcctagtttcagacgaaagtgactttataactttatttgctttcataagaacaaaacaaaactcatcttgtatacattttgagagctaacggtatgattccagaatttatgtatacaacttttctcaaagccaaaagatacaaatactactaagaaacaaggtcaaatgaatttgataagcaagccttaaaggcgtgaaagaaccaacttttttactgaactatattcaagtgatgcttttcttttcttttctgacttgtttaagcgattgccgatttgattgtctcagtttcttcaggacgccaccatgacttttcaattgaaagcaagccttcattgtctttggactgcgtcattttaaccttccatttcatagatttcaccattttctcaacttctcctaatgtttccatgtcatcccttatgatgaaagttccttgtggcctaagaatccgatcaatctcagccattaccgacaccaaattgcacctgtaatggaaaatatgaaaaatggtttgattcattaactcagatcagatcatcaagctctgcatttgaaaacaaggagaaccagtgattgttttatacctcttcctcagggtagagaaaagatgatcggcatggagaaggtcgtaagttctgggataagtgttgaatgattcacaccagtcatgatagattccaaataaaccacgttcatatatgatgggaagtgtatctggcgcatccacaggaaccacgttcatcacccataacttcaaatccttcaacgcagcagcaaatcctccatagactgctctcatgtccatcacgtttctcacattagaccaatcgattcccatgtcattaaggtatgcctttgagacaatagttttccacttctcttggtctgctgtgaaatcttctggtgcaggttttccataaacaccttcctgcgaatccaaccactcaggcgcagtttcaaccctctctggccacatgtttggccacactgctcctcgctttgatgaatcttctgtcactttatgcatacatgcctcaagtggaacattcctaaaccgcaaattcaacatataagcatcagattgcattggttaactagtaaactgacgcagggtttatgttgctctaccaggctgcattttgatcatcggaatccttgcagagaggtggctcattttgaggtcttttgttgtaacatttatttgaagttggcttttggtatatggcggcaccaacctcattcagtttgtctttcttaattgtcaccagcttccagcacattgcctttgtgagttccgacattgctacaacacaacgaaggcctctccaaagttacaaatcaattttcaaaagcctatcttgaggtaaagagcaaacaaagaagaaaatataaaatttctaacctttccatataccagaatcttcctcgttctttctatagactggagtcgctgaccagacaaagaaaccacccggcctcaaagcacggttcaattccaaaagaagtttaccaccttcatattaaacaacaacaaagattagaagttcattctatagagtaggagtaaggcagaagaatacaatggggtacactttttaccttcaatatgccaagggactctacaacgagcacaatggataaggtcaaaaacagaaccgggaaacggtaatcttttggttcccataacgtttaacattgcaggaataccacgttccagcgcgaattgcacttgcgcctcatgctcatctttgggagcaaatgacaaagcaagcacatctctttcgaaaaggtaaccaccaaagctagcaactccacatccgacatccaatataacacgggttctatttccccatgcaatagcaggatgtgactgcaacaatataattaattcagtacttatcattcctagtaatgaaaaaattatgtggccagtataaaattttacctgttggatgaaatcaatgtaatgaagagcaccattcttaaactgagtaccaccaccagggaacgtcagatgttcaccactcatcttcacccaattttgatgccccttgatctctgcaagcttggtgtggggaacattgttgtaccagatctgtgatcacataacagaagaatatatgtcatgacacataatacaaaagagtgcaagcagttttctccaaaatctgataaaatgttcatgttaattctggcgcaggactattttatttgcaaccagttttaaagaaagagtttaccttttccctgctctttggccacttgatggaccgcttataaccatcaggcagagacacaagacaatgaggagattcctcaggacaatggcgctcgcgatgttcatagtgcattgtagtatgaagctttttgatagcctgccaattgtcaaggcaagggatgtagtctggaccagcagtcacattgcacgttttccatccatagctactttggtccttagatatcgaggactgttgtgctttcttctcgttctgcgactcaaccaattgggttgaccaagctccatctccagtgctcgactcttttgtaatttcagcctggtcaccagctggaaagacttccttgctactcttctccgtgctttcttcagtttcactagcattctcttcagccttctcttcgttgccattaccatcctcggacttattttcttctgtgctctcttccagttgcgttttctctttctgcgttgtttcatcactttcggatcctacttctttcacattcttctctttctccccatctccatcaccattgttgtcatcagactcttttctttcctcgcctgcttcagttttctcgccagagctctcattgacctggtttccctcagcagagttctcagaatcagtcttcacttggttgttctcagtcgcagcctcattttcttcattcttttcatcagaaaagttcttcggatctcgatcgccttcttcttttctcaagtcattcttagaaacatctttagcagtatcagttgaggagtagccagcagaatcagcaggggctgaccaagaagacatgaacatccatgtcccaactaaacagagggaaagtaacagaacaatggtaatggttaaaccatagctcgatgatttcttcccgtctacacgggaatacttccccatcgccatgtccttggaatcaatgcaaccttactcacatccacctaaaataccaatcacaaagaagacatgaaactggcgcaatacaaccagtagaaatgttaagtataaactaaaaacaaatcagtcaaatttttcaggcacaagagatttttttgtttggtcaacacaagagattaaattcgttagcttatatacacaattttctaaacttgagcagagcaagaaccaacacgtagttacagatctagatatggaccaaactaaacaagagttacctctgaagcatatacaaaaacactcggatcttactactcgaagaagagttcaaaatgttaaaaatgttaaaaatggatccaatcaaataactttgttccaccaaaacaaaatcacaaactagtaatacatcaaaagcaatacccagaattaagcaatgagatcgaaagaggcttgctggaagaataaaaaatattgaggcaaaagatttaccagaggatatttatggttatgtcaaagatcctcaaagattgcaactttgggaagcaagtaggatttttcggatgggatctagtagagaacgagcttagcgggttgattccagtgaagcaagctaagtgggttacggccttaaaacgtcaaaagttacgctttttaaatattaaaaaacatttattttcgtgttttgtttattctcctatgccgcgttaatcaccgacacagatctctcaagactcgagtctgactgaagaacaaaacagatgcgaaatctgatagaaaacctcacggtttgattattatgttcactttacgaaatgaaatttctgaacaaaaaaacagaattttgaaagcaaattgatcataaggtgatacagcttaacaacttataagagctgtcgaacataagcacagcgttggactgttcgatctccccccaaattgatagagagacaaatatgatgtataaacgaaaaacataactgtgttcagatctcgaatatacatttccaaaacgtgacaagtttatgtttttttccgtatgtttgcttaataacactcacattattgttctaacagatataaatggttgagaattgtacagagaagaatctacagaccatgaatcatgtattgtcggctgttctttgagcttctgctgttcactgtttgcaattttatcctcctcctgttcttcacatcacacatagacactgatgagacaaaatgatacatatccaaatattcatgaactacactttatgaatcataatatcaagaaagatcagaactaggtccttcgagaagagtggagagaatactagaaaactctgatcctttgaacggtgggtaaaagttaactgattacccatgtaaacaacatggaggtagctttcgagtaaaggaatcaaagtttcagagactagaatcctacagtgctaggtttcaacggtagccaaataggtgatgttattatatgacttggaatttatcattggttcaaaccaatttcaaacacttgaaagcaagaacaaacatgaccaagatatagtaggaaattacttctgagaagggtttgaatgaggatagagaaactgattgaaactcttgagctaagcagtactatacctaggagcccatccactatccgaaattcttgctcaagcccatgaaccctcttacttagcttactagaatgttaggatgctcagagtcaagtgaaaaagttttactgaacttatttataaaagaattactaacccgtatttatctttcagatcctgccattacatcaaacaaaccgcagcaactcaaccacgacgttcgaaaaactggtggaccagaaggcaaaagactctgcacatatgtccagaagattcagaaaactgaaaaataacctcaagtagaggatgcaagaaaaaaagaaggaaattataccttttctttagaacattctggcacttcatattctttcacattcttgatttctttgttagtttcctcagcagatcttggactaaggatctcttccttttcatcagacttctgttggagagaatccgagtccgtcgaactctcaacttgcttacttttgtcagacatcacaacttttgagacagaagaacccataggcttgacagaatcaagagcaggtgaaatttccaaacttgaagtactatcagcctctctagaagtttgagtaaaattttcaggacaggaattgagttgtttgtttacaccattctcctcgtgatccgttcttcctcttccaacttcaataacgtcttcacctttcgctacttgtcccccagtaaagtctgcatcttctgctttctctttaacaatgtctttccctaaactagataatggaggaggtgatggatctctagtcccaaattcttcatttccttgagatccaggggaactcaaattgccatcactgtctctctcatcttggcttccatgttcatcatgtcctgagatattcagtaaacttatagatccagggcaataaaagacttactcttcagattcaaagaggattactaaaaaagataggaaaaaacatccagcacttgttgcaacttgcaagtatccagaagcaacacagagacaactcagacatgatgtgattagagtaaagtcacaaactttggaacaataattaaacagagattggctaaatctcaataccccatcagattcatccccacccaccaaaaattccctataaagtaggaccaaagcatcattcacttcgttttgtataataccaaaagaagaaactttacctaacaccagaaacccatttgagacataaaatcctgtaaacagcaactagaatcaccaaaatccatatcgatccagcaactacaaattctaagcgaaaaccaaaaacagtaacaaagacagtaccatgaccattgaagcctttgttgttggtagcgactccagtggcttcctgctcctgctgcttcttcttcaaagcctttctctttttggcaccaggcggcatgatcaatggatttacgacaaaaacagactagagatatcgaagataggttcggtattgtattgccgtattggttagtcgttcacttgaaagatttatggagcttgtgggtttgttggtttgtgtgatgtgggtggagttgtttctctcctttttgtctttatgttttggggaaaatcaaatgtcacactaacagtcacaaaagcctagagataaggctgagcccatttattaaacgtgtcggtctgcctccaaaaatccactgttcatcactattgttttttttttcattacaacttttttttgttcatcactagatttataggcttctaatattagattgaaaattcccattttgatcacttaattcatctttttcagatttattgtatgttttagtagacacatattgttggcaaagacggtatggagatatccttaacattacagtagagttgggaaaatgcaaaagtagaagaagcaaaagcaataaaacacacaaaacagtagtagatgatgatttaaaagttgtgaaacaatcacaccaaacctatgtggtcgatcttttattactacttcatcggcagtactgtcggagacatcaatcacatgatgctgcgtctctttttcatgtgtttccgtattttgttttagcgcatgctccacctgaaagatagattaaacagagaatattaaaatcaatcacatgtttgtgaagaacaagtattcacctatacaatgtttttttggatactaatttacttcttcgtgtgccatattcatagtatggtcatgctccttccgtgacctctctttcattgcaattacctctgcttccgcaaggctcttagattcgatctccctttctttttccttgagcttatcgtcttcttcctgagaaaccgatgatttgcaggatttttaaaatctatatgcaatagtaattcctaaatattggtttggtagtcaatcatctagtggttattgtgtatcagtagatgaatactcttatgatatgtctaaaagtgtaaaaacattttagaaaacaaatatataaaatacattaaaaatgttctccgtggttaattaagtcttagttttatctaaaagcgaagcatacagtaatcacttcacatttttttttgtttggtaggaatcacttcacatttatatgcacagcaaaacacactgttttttaccttactgttatctcaaagctctatatttacattttacttaattaccatggtaacacctcctgcatctgctttggatatgaagagtttttcaccgaggagggtgtttccagtgaagctttttccattgccattattacgccctactagaactatgcttgtaacggagggtggcagttcctgatcagccatattctgataataaaacatcatgaaataatatcttttgaaaaggagaatgaagagaggaagaataggcagactatatataccaagtaaaacttacaagcttcttatccctttgtcagtgaagagcaaaagatataggcaactttagttaatccacgaaataatcatatatatataaatgagtgaataacaaaagaaaaatgaatggataagttaaatcatatataaaaagtaaggtttaattttcattaatggaccacttgatatttttcttaatagtaaaaatattattctttttaattacattattaaaaaacaaattcaactaattttgtaaaaactataaaagtagatgataaaaataacagtataataagacaaattttataacgtctatgcatgtgagccatgatgaaaggagcaaagttaggcttaaacaccacgtaattgattttgcaattataaaataaaatgagaaaaaagaaacagtccgataaactcaaactttgtaatgtctatatgagagccaggatgagactgaggcgtgaaaggggaggaaaattgggactaaacaacacgtatatatgagaggagcaaagttgggactaaacaccacgtacgtactatattataaattcattgttgaacatgtaacgtatgggtcctttatctattgaaagttagaagtcaatgcttgaacatgtaacgtatggactatatatggaccacctatccactggatcacttaaaaacttcctgaaagttaaaataatctgcttcgtggtttttctttcttacatttctttatgttgatctctatcaacatttattttcttgaccgttactcgtttttttttactgattttaatcaagattttatacaaagcgtaaatattagtttgaaaatccacatcttgatcacttgtaaatttgtaatttggcgtttgttcagatttattgtatgttttagtaaacacattttattaacaaacaaggtttaacatgcatgtatggaggcatcattgacgcacgaacattacaatagagttggaaaaatgcaaaagtagaagaaacaaaaacaataaaacatgcagaataaaagtagatgataatttgaaagttgtgcaagtatcacaccgaatttatgtggtcgatcttttattagtactttatcagtagagttggatacatcaatcacacaatgctgcatctctttgtcatatgtttcctcattttgttttagcgcatgctccacctgaaagatagataacgagagaatattaaaatcaatcacgtattgtcaagaacatgtttaaacctatacgaagttttaaatacagttttactttgtgttccattatattcatggtatgctcatgctccatccgggacttttcttccatcgttattaactctgcttctgtaaggttcttaggttcgatcttcttttctttttctcccggcatattatttccttcctgagaaatcgatgaatggcaatatttaaaaatctattaacaatagccattcctaaaaaatagtctggcatgacaacgtgaacatataagaaacatgctactttgtttgtttgtttgtttgtttgtttatttgttgtaatcaaatcgatcggtcgtgagaatgacggctatcgcaccgatgttatctaaaggcaaagctcatatatacgagatatcacttcatattatgacctggtgagtatacggatgcccactattttggttttgagtagctgcaacatggtccagaagcttgactagaagaactatgtttataacggagggaaagtcttgatcagccatattctgatcaccagcaattaattcctgcatgcacgtatccatgttgagtacataaaaataataccttttgaaaagaagaatgaagaaataggaaaaggaagtttaattggcagagtactatatcaaatagaaactcacgagctttctgatccttttgtgaatgaagaacaaattaaagaagaatgacaaggtaatctacattctacaatacaatcatatatatgcgagtgagtaacaaaagaagagtgtatggataagttaaatcgacgtaacaatcatattttagattatctaacaaaacaaaaatcttttattatatatatacgtaaaatgagctctctccatctattgtatcagtgtatcaccttatctctaatgttgtaaaaaaataaaaatatgttaatttagaagagatatcaatttagtttagtagtttagaatttggaaaccgaacaaagaaaaataaaacattttatgaaacaagatttaatttttaaataaaactattaaattaattagggaccaaataaaatacaattattggtatttgtataagtgacacttgagtttaatttgcttacttaatttagtatgcgtataatgtagaagtagaaacggtaaacgaaacagaaaggcaaagacgacttttgaagatattgactttggtacttccttgctgttgagtgttgtctttgttttgatttatgaactatatcgtttattgtttcttctatcgtttttgatagtcttatacttacttcggacaaatcaattgattatgtatatgtttttgttttgtttttggggcaaattgattatggataagtatgcatgatatgtcaacacaacagtcggaataatcgatttaacgtctccattaatttagaataatgatatattgtggaaatgcatgagactcttttaaatatatcgaagatgctaaatatcaaatcagttagttaatcacttttcaaatcaaatcaaattgtatgttcacaattatcactttgttaatccccgattttatatggaacataaaatacaaacaccattagtaacatattatcattgatatataaagtgagaaactatgaactaataaccacaaatctgttgaaaattttacaaacatgtcataatgatgtgttgcgataagcatgcttctcagaaatttgggcctccaattttaaaaatggatgataattataagaactaattacacatggtgacattggtgtatttcttagaaattctaccctctaaaactatgatttactataagaccaatacacaagattcaatatattaatattgtcatgatgttacacattcacgtttttaacaaaaagtcatacccaaacacactattagtcattagatgtcgacctaaaaccaattaaaagtagtcatataattatttatactctacaatacgtaacttcatcatatcaagtagagaaaaacaacctgaacaatatcaactttatatttaaattcgagttagaaatgtcatctaacaacaacttgttcacatcactcactgttttggatacaaacaaaataatatccgtcaataatatagtgaaacattttcaaacaaaatgctaaagaaaacagcacgaaattattaatttctcacataactgcatatctaacaaacttagtagttctttataaattcttaacatatagccttaataaaggggataggtttaatagaaactatttttgttaaattttagaatgattactaaatatactttttaaaactaaaacaagcaaaaaatatattattttaaaaagtataagcattcaactaatgaagatcctttaacagaaaagaaaaacattcaactataaatactttgaaaagatgcttcaaaaaaaatgaaaatgaaaaatagtacattcaatttatctaattgtctctcggtagcaggaaatatggcctatagacatctatttagagaggcgagctgtgtgagatgtccagatagtagagaaacagtgaaccacctattattcaaatgttgcttcgctagacttgtctgggctatttcaccgatcccagcatatcctgaaggagagtggactgattctttgtacgccaatttgtattgggttcttaacttggaagtggaaattccaaagttgggaaaaattggcaatcttgtgccttggctcctgtggcgtctgtggaaatcacggaatgagctgatgtttaaaggaaaggagtatgatgccccggaagttctgagacgagcgatggaagactttgaggaatggagtactagacgggagcttgaagggaaagcctctggtcctcaagtggagagaaatctttcggtgcaatggaaagctcctccttatcaatgggtgaagtgtaacacagacgctacatggcagttggaaaatcctaggtgtggtattggatggatcctccgtaacgagagtggaggagtcttgtggatgggagcaagagctctgccaaggacgaagaatgtgttggaagcagagctggaagctttgcggtgggcagttctcacgatgagcagatttaactataaaagaataatttttgaatctgatgctcaagctctagttaatctgctgaattctgatgacttttggccaacccttcaaccggctttggaagacattcagcagctgctccatcattttgaagaggtcaagttcgagttcactccaagaggcggtaacaaagtggcggatagaatagcacgggaatctatttcgttctcgaattatgatcccaaattgttttctattgtgccacagtggcttagaagcactttgatttaatttggttattgtaaacacgttggttaatgagtatttgaagttgagccaaggaaaaaaaaaaaaaaaatgaaaatgggtgtagactagtccggcctacgaaacccaaaatctattattcagatctaaactcttcgatctgagacctattttgtctagaattggccgagtagggtctgacgcgaacctaggatgcacccagattgacatttcagcaggctgatgtgatgtgttgtacaatgtcaactttaagtggcatgtatagatgctttagtgacgtggtgtgatctctaccgtccttttacaatcatacggacatctcaaataaatctcaaaaacaaactaaataaaaaaaaatcttcaagaagaagatgattgatttatttgtacaatacaaaatgttaatgggcttacttctacatgagatctttaaacctaatctcatcttattacaaggcaagatacggtaatatatgaatttggtgttgactttttgagacttggcttcttgagaaaatggctacaaaatctaatactaagtagagaagactgagtcagctgagagaagagaaagtctcttctctaatttagaatcatggtgttccacaaactaagtgactctttaacacaacaaaacgtgaaacccacctgcaatgtacaatggacatggttacaaaagagaagccaacataatcacataaacacatacattatcccagacctttgcttctgtctccttcttcttcttacattctctctttttttctacaaacagaggaaaacaaccaagagatgaggggggctgagtcgttagttaccttaaaccacaagattctcagaccatgtaggaaactcctgatcagaatcaccaagagctgtccccgacgccataaccggcatttaaaactcaagaaagcctcttcttcttcttctactgcttcagggaacaaggtcaccaaagtggtggctttattcttcctctccttccataagaagaagcagaagaaagaaaagatgaagcggcttaacgaactcaggagcttctcgcacgcagtcaatgaccagaagaagaaggcaccaaagcaagaatcaagcaagaaagttttcccatcaagactcacaatgtcttggctaggtcaaggaaagggtaataacaacaacacgcaggaagtccctcaagaacatgatgcacgtagagacagcacaagcgcattcattccttgattttcaaacctgaccctcgaggtcaaaaactattcgatttcaacttgattatgtggatatttcaatctgcagttattgacattgagagcctacacaaagatatctatttaagcgatactctctaacgcaagatcaatcgtttgtttgcattgtgaaagttaaacgagattgattcattatttgcatatgatttttgtaatggagttaaatataatattagaatcatcatcaaaataaacgattgtaatatcaagaatccaaataatataggaaacagaaagataagaagatagacattgaaaatttatacatctatcctacaagcacggaccaattgcttcattccctacacccaatcttaggcacatcaactcaccgattgggttgatacaaaattggagtaagaagccaggttactatcctccaaccatttcttgacatcatctccatagtatgagaacctaaagcagagaccctaaaaaacaaaaacagagcaaataaaatcttctcattatactctgtaaatgagcaacaatagatttagaacaccacattacatatgaagctaaagtgtttaatttgagagtacgcaaagaactggttttggctaaaccctaattgagaaacccacatacagaaacagaatcaaaatgtgaagcaatagatattgaaaatattccagaaaaaataatgttgaaactctaaaagtaatgaactttaagaccgacattgcgtgtataagagtctcaaaaatggaaaagtagcagagccaaacttactctttggagaagataaatctggaagggaagctcaaaagaagtgaagccattgggcgtggtagcagtattagcggtgggaaaagggttaaaccctaagactaaaaaagagagagagagggagagagaattaagagttaagagtgtatttaagtaaaagtaatgatctttggtgagcggcgtgcttacagttctgcacagagcacatttatcaatgaatgtgagagacagagtgagacttttttttgtttttggtttcgtcgacgtttcgtgattcgataattcgaaggtcccctttcttcccgtcttctgaattaaaataggagaatttttcccccggttcaatgtatatgtagggctctttagtgggctaattggtttcttaatgggcctgttaaaaaaccaattttcaaaggaaaagtcttatgtgttctttatgtctcgtatcaatctctttttttgtttatttttcattaaaaacattaatttagctttaatacgtgaaaatgtgttcttttttttttttttgataaattgcatacgcagcaaactaaaagatgaattatgtcgtatgtataattgtatatacaattttcaaataatcattttagctaagaaatttaaacgcacaatatttgagattgatacagaccttatcattgctatgcttaatatgcttatcctttaattatgtgtcttttatatgttagtgattccaaaatttttatagagttaacaaaaatataaagtacatttctcttcttgatgtcacaggcaacaaatttgctcgctctctcactgtctctcacaatcaatgacaacagaacagctgtttctgtttggcttttgtccacatctgcactacataaatcctaactcaaatatattcatcacactttcataattccaattaagtacccccaaaaatacacttgacaagccttgcattttaaatcctaacacaagaattattgttattcttctcataattaacccgaaatttccttgtttcctattacaatttaggaaaaacaaaagaatatggaaaaacaaaaactaaggagaaagctttgtttcacattttccccaccctttacttaaataaacaacacggggatccactagcaattttccgtaatatgcaaaaaaacaaaagagttgggaaaagatgatgaagtatggcaaaccggtaacggttcaagcctccaaaaaaccggttaacctaagaaccgaattccgaacccggctcagatctcttcccttaagagtccttccactacctgaacaaacggaaaacgccatttgtcctccttggatcctccgtccgatcataatatgcggcggaatcatctctcctcctccttcggaatattcctcctctgagtattcatcctcctctttcccaacgtacctccgaaagatgttctcagggatactcaccggaagcgagctcgacaacgacgccttctccgtcgtcgtcctcttgatccgcctcgtcttcttcctctccatatcagaaccaaacaggcgattctcgttctctttatggagaacggagcttaaaccatcggagaacactacctcagattcatcgaattcctccgccatttactagaaattttgggatgcttttgttagttatgagatgagaatttgatattagggtttggagagactcaaaatgatcttaacctgatctaaacaacatgaagggttttatatatagggaagagagaagaagaagaagacgaaggaaacgtagagagtcacaagaagttgttttggggttttgtgttgtactgttttatgagatcagatgatgtcatcatgatcatggcattgagtgcggaccccgcttactttctatatctgtacacttttacacttggattagtattatataataatgaaggtttgctaaagcaaaattactttatgatatgtggacatatcttatctatatgtgtccgagagtaacgcagactgggacttcgattggatcgtccttttggtctcattatttttgtctctcttataattaatctgtgatttgtgaacgagatgatgattgatccgtgaatgttcaaaatagatttggaataccaacaaggtttaagagaaacaaattggacacttttagttcctgtttaaggaaattatattactcttgataagatgtcaaatcagcctctggttttttttgcaaggaaatgaattttatgtataattaaatgaaaattcattaatttttatatttaaaatcaactaatgaaactttagtttttatttttttaaaaaagaatatgacgtaaatacacgtgaatttgtcatatttcgtaacttgtgtctcatgactttttctcatccattgtatacaaaacttgatatgtcctttgtaattattctgaaaatattttcatttaaatatgtttaaatacgtaaattcaatgaatgcggagaaaaaaatgtatgatcatgaatgttattgtggacgtttagttttacaagaacctgaatcaagttacgtgatccagattgatttttcgatttggaaaaacatagaatcaagtttcgtttagtatttactaacacagtaacactataaattggactggacggagacagacttgtcaaataatgtatgctacttttgttttgtatgtgacaagtaactgcagattggcacacaaaactacatggtcgagatcagttccaattttgaaaaactaaaatcttttttgaactatattttataaaaccagattgttttagtcgatcacattttgagattgtgaatgaaaactagtatgtaatctagtaacatttgctctttcagatttttaattatcaacggagtatgtgataagttcgaatcttctacacaattaaaaatatgataacttcgttaaatagtttaagaaagctaagatgaattaacttatgggaagttggaaacaacactttttgtgtgttttactgggaaaggaatctaaacgtctgcgggtacagacacatcagggcattgctttcggcccacgcgtactattttctatatatatggtgctgtgttttaacgttagcggccggtagcagagtacaaaataaattcattttattaaacatagaaacaaaaaaaataattagtagttctaacttttagtaatatttgaaaaaggtgctttttagttattttcaactcattttgataattagattttcgttctttttaattatagaggttcaattatgaaattttacaatgtttaagactttacaatgtttaaattttagtactttttatacgaaatagtattttgagatcaaactacaagataacaccacaattattttgcaaaaccaagtgcttaagacagtttaataaagacaaaaataattagtaattaagaacacctaatgatgaaagaaccatgaaagattgattcaccataaacacaaaaattcatctaaacaaggttaacaattgtctccttatagcgcttagatttcacaatttatgatgattgatgactcaattactaaaatttctattttgttttcctaagcttatttttcaaccgatatataaggaagaaaaaaacacttgaaactacagacgctaataagtactaaagtgaatgacatctcttttatttgtttctcctttttttcgttgattaacaagaaatcaacaaaataatctttggctcggcatttagacttttaggatctgaaaaatgaaaattggcggagtctacgcaggccctacttttcagatctatcttgaaatgcgaatattatatactctggaagatttaaattatctggtggagtaatcatttcagtgagaaatagtaataaattaatactactatagtacattagtagtactatacctgaatatgcattggaatttgtggtagaagactagaagtagtaagcttcttttgtttttaatcaaacaggtagtaagcctcataaattatgtgataaaaactgataagaattttcttttgcaccaaaaaataaaattaaaaaaatgagaaaaaaaaaactgataagggttccgattttgggaatagcaatagatgagagctaaactgaaattgttataggagtttagatattgtttagttatacttatatttgtatgtcgataaaatataaactgtgaagtcatggtgttgtgctggctacggaacaaaccacgtaaacgggtttatcctgattattcgttgcttacagttttggtttaattcaacacgtacgcaaataccacatgcaaatctaattaagtaacacaaaaatctggatttagtttggcaagtaaatggccttcgccaatggataatgttttccttaagattcttaaaccttgtctttttaacttttaagcaacgtatgcttggataatatccaataggcatctcttgcaaatatgataattaagaactcgtacaatttatatcgattgtcttctaatgtacgtaatttcattagtttactccttgtttatattcgtgtttatgagtttgagtttatattttagtacattaccgtaaacaatcctttatacgtgatatactgtttttgtttgttaacagggaaatatataccattttcgaactaccctacatatatatggtagcctaatgatatcgtcgattgtataactatgtttggataactaacaaaatgcttaatccaatattataattttatagtcattttgagaagatttgttctaagacaaaatatatatagataagaaacataattgcatttaattttaatagaaattgaatgtaatttttttgaaattaaaagttagagaggtattcaccatttcacctagtgatttgaaatttagcaacaaaaaggaataaatcttatgttattcaccattttacctagtgatttgaaatgctactttaaaattcactgctattggaaactttttaaatattggatttttagtgacatcaagggtttatagaggattttttagttaaaaatacaaaatctaaatctcctagtttcaactttttaagtgaaatttgaggagattttacaacaaatcataataacttcccaaaattcacctaaaatcatctaaaacttaaaatcatttaataggattgaataaggttcattttactacttggcagttggcacataatataaaaagatggttagttaagttattgtcttaagttatatgattgtgcattgctgttgaaagatttgctgatctacgttgttgtcatcgattcgtcaagattatacgaaccagctacatcctacatgtctggtttttataatcacattgaataaaatgaataaatatattttattgaaaacgtcacgtttaaattcatatacatttgattgattatataatgtagtccaattaattaatctctcctctatacagctgtttctatagattattaattaatggacttcctcgtttcacatggtagacatttcagatttagctttgtgtttacccagatctggattcaggtatctcggtttaggaattgtaaagtttcgtgtagttttatggggttgtgttatcggttaaatttggtttagtctagttggaactcggtttgcttgtcccgtttgttttaattatccggttatatttggtctaacgaggccaattaatgcccacgattatacaaacttttcaatttaaagttgacttttactttcattttaagacaatggatactcattttgatcgatgtagatagacatagagaacaagagaaaaagagagaaagatggagttcgcaaacacgaaatgggtggctgcagcggcgagcatatggatacaaagcttcagcggagcaagctacacttttggaatttattcttctgttcttaaatcatctcaatcttatgaccaatctactcttgacaccgtctctgtctacaaagacatcggagcaaacgtaggcatcctctccggcctcttctataccgcggttgcaagccgaaaaagcggtaatggtggcttctttagtgggccatggttggttatatttgtggggctactccaatggttcgtcggatatggattcatatggatggcgacgtcaggagtgatcccacggcctcccgtggctatgatgtgtttgttcatgttcttcgctggtcattgtcagcctttctttaataccgcgattgtggtcaccgccgttcgtaacttctccgactatggtgggaccgccgttggcattatgaaggtaggttatattgagacgtgagaaataagatattaattcttgtattaaaaaaaaaacagtcgatatattaaaatgatgatacatatgaccggtcatttttcctatatatagttacataaactagtgaaaatcagtagtttggatgttgtcttgtagaccactaaataagatacatcggtagataacaatcatagataattcttcatacgtacataattctcattacaaacatatatatacttgataagttttgtagcccttatgtgttgtatttcttattttttattttagggttatcttggactaagtggagcaattctggttcaaatgtaccacatcttctgtggaggtgacccaaggaattacattcttctcttggccgtggtaccatcacttctcatcttgacgttgatgcccttcgttagaacgtacgacacagtcatcgcaggcgacaagaaacacttgaacggtctctctgccatttctttgatcatcgtcacctatcttatggtcgtcatattggtcgaaaacattatcggaatgtcaatgcctatgaagatatgttcctttacctttctacttctcttgctcgcctctcctctcttagtggcggttagagcacaacgtgaagaggaacatagattcttgtctttggattttcctgttaccgagagaaccacattgcttgactctcctaagctcaattcttcttccggtaaggtttagttttggttttcttatttattgacgaaggatatatgtatattgtggtcttgaagtgaattatacccttatatatatcttagttaggtcccttagttatgcttatcgaagtgaaattcctaacacatttcaatcaatcgacagatgttaaagatgtcatgaccaatgacatgaacgttctcgaagcaatatgcacaacgaatttctggcttctatttgtagcaatgatatgtggaatgggttcaggacttgcgacaataaacaacatcagacagatgggcgagtcacttcgctactctacggttcaactcaattctctagtgtctctgtggagcatatggaactttctaggccggtttgggtcgggttacatctcagacacctatttacacagtcatggctggccaagaccggtattcatggccataacccttggccttatggctataggtcacattgtcatggcctccggtttactaggaagcctatatatcggatccttgttggtcggtttagcgtacggctcccaatggtcactcatgccaacaataacctctgaaatattcggggttcttcatatgggaactatattctatacaatttcgatagctagtccggttggttcgtactttttctcagtgaaggtaataggctacttgtatgacaaggtagcttctgaagatgatcattcttgttatggaaatcactgttttaggacttcgtttttgataatggcggccatggctctgcttggttctcttgtcgctcttgtgttgctcctccgcacaaagaagttttatgcgacgcttgtggctaagaggatcttgaagtaatctctatgaacctaggggtctgaatcgtggctccatattcatttaatttgtggctctttcttccctcgaatttcaaaagttaatatctattgtttgtagaaagcgtgtgttgtgaatttatttcattgaaaggaaaaattgagtcatgatcatacatatgacctaccttctctttttattgacatcagtcatttaacctaaatatgacttttcagaaatttgataatttgtgtgcgaaaattgactagtggtctcgccgcttgccagttgccacaagtcaaaagtttcggtaagctgataactaaaattttatccacaacaaatttactattattcgatctaaatagaaattttggttgttaaaattgttttcaagattttgaatggaaatggcgatttagcggcagataaagagcgatgcggttctgataataacgaatatactattgaaaaccaaaccgtatcgctgtttcgtctcgttcaaagatttagtaataattcatatttatatgattatattaaacgttagctcaactgtcaacttaaacaccttttagatctcgcaagagcagcaaataattaaaaggctaattaatcacgatgattaacggtgtccagagtacaattgaatacttcttctcttcctttgacaatgacatcatcatcatcagattcagcctggagatttccttatatagttgtgtgtagtaaaattgaaagcattggagacaatggagagaataaacacgaaatgggtagcagcagcagcgagtatatggattcaaagctttagcggagctacatacacattcgctatctactcttcaatcctcaaatcatctcaatcttatgaccagtctactcttgatttcgtctctgtcttcaaagacatcggtggtacctttggtatcatctccggtttcctttacacggctatgacttctaagtcacgcggttttggtgggccttgggttgttgttttcgttgggttggttcagtggtttgttggattcttttttatttgggcttcggtggttgggttgattgctccgccgcctgtgccgttgatgtgcttgttcgtgttcttggctggtcactccttgccgtttttcaatacggctaatgttgtgacggctgctcggaacttttctcaatatggtgggactgctgttggtattatgcaggtaaaaagtttgtaactttgttaaagaatcatcatattgggtgaagttgaaacacaatttggtcgatcttgtgtgtttagaagtctcaaaagacttcacctttattgacaaaagactcacatttttttatttggagctttgtttgcatcctagatggtgattagtctgtttcacttgagtctttttgttgtttactctctcagcttgatgtatccaaaaactgactcattttcctctaattgtgtttatctttgaacatcagggatttttaggactaagtggagcaattctgattcagttgtaccatgcggtctgcggtggtgaaggtaaccccgctactttcattcttctcctggccatagtaccaacgcttgtcatgttcttggctatgccttttgtaagagtttatgaaacggtgaccattagtgacaagaaacacttggatggtctctctgcgatctctatgatcattgccgcctatcttatggtcgttataacggttgaaaacgttctcggtttatcacgctcaatgcagattttctccttcatccttgtccttttgttgcttgcctctcccctcttggttgctgtaagagccctacgagaaaaaaggcagacactttcttctctggatggtcctgttctcgacacatctgccttgctcgaccctcctagttcaaacatttttcccggtaaatatgcttacacatatttagattaggcacccctaagccagcacactaattgaacagcatgagaacgggaacactgactgttttacaaatgttgtgcagatggagatcatttggttgctgaagattcaaacatactggaagcaatgagcacagtgaacttttggctactcttcttggcaatgctatgcgggatgggttctggattcgcgactgtaaacaacatgagacagataggcgagtctcttcgctactcttctgttcaactcaattctctagtctctctctggagcatatggaactttctgggccggttcggggctggttatgtctcagacacattcttacacaaacacagctggccaagaccgatcttcatggccataactctaggtgttatggctataggccatatcatagttgcctctggtgtacaaggcagtctctatgccggttcagttttgatcggtatggcttacggttcgcaatggtcgctgatgccaacaatcacatcagagatatttgggatccggcatatgggaacgatttacttcacgatttcgattgcaggtcccatcgggtcgtacatcctctctgtgaaagtgataggttacttctacgacaaagtggcttctgaagatgacaattcttgctttggaagtcaatgtttcaggacatcttttatgatcatggcttctgtggctctctttggctctttggttgcttctgtattgttcttccgcacacacaagttttacaaaaaccttgtagcaaagaggaacttgaagtgagcttgaaaattgtataaacctttatgtttgtgatttgaagtttgatactttgatccaaacaccacaaaactatttgtaattgtgccatgaatatgcgagggagatttgttaaaatataaattggaccataaattggtaaaaggttcctgctaaattgcaaatatagaccgtgttggtcggtttgaccggttgaaccgaattctagctaacatttgggtgctaattttaactttaaaccaatcactttaccaaaaccggagggagtcgcttaaaccctggtttgggtttttctgtgaaccctaaatgcttcttctcctttcataatcgccaacaccaaaacttgtggcagtctcttttagtcgtcatcgatcttcaaatccaacgagggattcttcaacttctctgttttcaggtaagaaacccgacaaacattattctcttctatttctgtttggattcaatctaaattctgaagctttattcttctctctacctgttttgtttgtttgcttgtttcatgtttctgagtctcttctgcaaccctaaagcttcaatttttgagtgtgtatttcactctctcgaagcctcaatcacgctttgttcatataaaattttagctagagtctagttttattgctatattgatgattattttcgattgttaaaataattatgaagattgtatagtattgcattaaaggtactgtctttgtgttcttatatttttaaccatcttatcagaatctccatcttacttttactattccttccaagcaagcttcttcaattcttaaagaaaagtaagttttttgttttttttgttgagttggtttcagtctcaaagttaagtggttgattaacctaattgttaccgttctattgtaaaaattttagctggatatagtcaaggaacggaacctagttatggaattattatgtgatgacattggaaccagcatgtgccttacaccctcagaaccggacctgcctgtttctgaagattttggggagtatatgcgctctcgcttatcgcagtccaaaagaccagaccatgaacatctatgcgctgtcatcgaggagttatcaaaaactctggctgaagataatcatcgtcggacacctgttgcttactttgcctgcacatgcaggtcgctagacagcctcttttcagcacatgctgaaccacctgtagatgtcgtccagccacatattgtcatcctttcccttgtgttccctaaagtctcagcaggagtactgaagagggatgggttggctttgcgtctcgtcctcaatgttctgcgtctgaaatcagccacgcctgagtgcttgatttcgggattgaagtgtttggttcaccttctcacaacggttgagtccattatggtgaacgaaggctctgattcctacaacatcttactgaattttgtaactcattcagacggaaaggtaaattacaaatttacctgtgttgatgatttggtctgcatcagactttgacgatcttcttctattaaatccaggtaagaaagctagcaagctcctgtctccgtgatgtcctgcagaaatcccatggaacaaaggcctggcaatcagtcagtggagctattacagaaatgttccagaactatttagacctcgcccataaatcggaagtgggttctaccgaaggagccagaggggcaaagcaagtgctttacattcttagcactctaaaagaatgcttggccttgatgtcaaaaaagcacattgctactctgattgagggatttaaggtgctgatgattcttcgcgatccatacattacaaggccagtgatagactctttaaatgcagtttgtctcaatccaacctccgaggttccggttgaggcgctgctcgaagtgttatctcttgcggctggactgttctcgggacatgaaacatctgctgatgccatgacctttacagcacgtttactgaaagttgggatgactaggagttttaccctaaacagagatctttgtgtggttaaacttcctagtgtgttcaatggtctgaatggtatgctgttgtatttgcaccttcctgcttttcgggtttccgaatttctcaaacatactgctttctttttaatgtaatttatcctactgttgacataatctatgtgcttcttttggcagatattattgcatctgaacacgaggaggctatctttgcagcaactgatgcgttgaagagtttgatattttcatgtattgacgaaagcttgatcagagaaggtgtcaatgaaatccggaattcaaacttgaatgtaaggaagcctagtccaacagtcatcgaaaagctgtgtgcaacagttgagagcttgcttgattacaagtaccatgcagtctgggatatggcttttcaagtagtttcagcaatgtttgataaattaggtaattattatttttatcctgagttttcatttgtttcttcttgttgaagattatctgcttaatgttcatgtgctaattctttcacgcaattttcaggtgaacattctgcatattttatgaggaacaccctccagggtttatctgatatgcaagatttacctgatgaaggatttccttaccggaagcaggtaactgtactatacttgtccttgagctgaatgatcatctgctgcattctagtttagggtacaaatacttcagatagtgatgtcatttttactctcttatcttggcataatcattgaccacgcagtattttgtctccattgtttcttgaccatagaatgtcaataacaattagatatatggcgagttgttctaagaaatgaaatgatttgagcatatgcaactatgtcaatagatattagggtgtgttgattttatattgaagtttgaaaatgcttgatcttttggctacagttcttgtgtaaacctttttctgctttttacttgacttagtggtggatcatgctgttggtacagcaattggatacacgaaatatctattctgttacttagacgtgctctcactttttttagtctgaaatgaatgattgtacgatatatgatgatgcaacatgtcactgtattagaccttgcttttgttagtcacgttccataatttcctgactgtttatttttctgatattatctttattggcgatctccagttgcatgagtgtgtaggatcagcccttggtgctatgggacctgaaacatttttaagcattgtgcgtttaaaccttgaagctaatgatctgtctgaggtaaaagtttggctcttcccaatcttgaagcagtacacagttggaggacgcctaagtttcttcacagaggctatttttagcatggtcgaaacaatgagccacaaagctcaaaaggtaatttttattatttcccgctatttgatgatgtatgcattctttattgttctttaattttgctatttgtttttgatggcagctcaagctacaaggtcttcctgtagcatccaggagtgtggattctctcgtatattcattatgggctttgttaccttcattctgtaattatcccgtggatactgtggagagttttgccgatctggggcgaatattatgtggagttcttcaaacacaggctgagacccatggaattatatgtgccagtttgaatattctgattcaacaaaataaggaagttgttgaggggaaagaagtacctactaatgatgctagtcctgctatgcaacgagctactgctcgttatgattcacagcatgcggcagctaatttaaaagttctgcggttatgtgctcctaaattattggatgttttgtcaaggatatttcatgaatgtagcaaagatgatggcggttctcttcaggtaattaagaaccttagatggctggcagggtattcgattaccttacatcgttaaatgtcaccagaactttttcatctttgtgttgtattctcgtgtaactggtcgatgtccctcactaattagatatagttcactaagtcagagcttgtcacagtatttgataactttcgttgtcttactttcagtctgcgataggtaacttagcttccatagcggagaaaaagactgtttcaaagctacttttcaagactctgcaagagcttttagaggctaccaaaactgccattgcacaagatgaaagtcctgttagtgggatggatgtggataacaccgcagacaaaaattcttcttccaacttaaggtactgttattccgatttgtgtttctagttgcttagttaaattgaccctataatctgctattcatttcagggcaaggttgtttgatctgttagtttcactcttaccgggtttggatggtcaagaagtagataccatattcagttctctgaagcctgcaatgcaggtttgtaaaatgatcttttgtattgaatgatttattattctgggttctggcgtggctgcgatttatccgcctatgtgcttatgtggatcttaactgcaggattccaagggcctaattcaaaagaaagcgtacaaagttctttcggtcattttgaaggtattgattacactcgactaggtcatgtatattactttcttttgtgcatagccgactgattctatgcttgcttagcgtctaaatcttcttcgcttggatgcaatgatgacattttgtgtctgcataatatatgcttattttatttatgttaaacagcatcagtgtttcctctaaacactgatgctgtttcttaaggtccttgaaaaccattgacctaagctctctcatttacaaataaatcttgactaatgtcttttggtatgaatttatacattgccagagttctgatggatttgtttcaaagaacctcgaggagttgcttgtgctgatgcacaatatatgccatgtctctgccaaacgccataaacttgattgtttatacttcctgttagctcatgcatcaaggactgtaagaagctttaacctttttactttatgtgctttaacctttttactttatgtgtattttgactaaatgtatcataataaagacgtaggttttagtttggattgcatttcactttgagttataagggaaatagtcctcctagattctgatggttcttttcctgtacaggatgatttaaaggagagaaaagacattgtttcttcttttctacccgaagttatacttgctttaaaggaggtagaaaccattgcttgaaactgtgacactatgatcgtgtaataatcattattcaggtcgctgttgtttctgcaggtaaataaaaaaacaagaaacagagcctatgacgtgcttgttcagattggtcatgcatacgcagatgaggagaatggtggagacaacgagaagttgcatgggtacttcgatatggtatgtattagtttaatcctttttgcaggagcgttgtttttcatttctttatcaatattgatttttgacctctgctacaacctcacaggtggttggttgcttggctggcgaaaaacctcaaatgattagtgctgctgtcaagggtgtagctcgtttgacatatgagttctccgatctcatatctagtgcttacaatttacttccttcaacatttcttctcctccagaggaaaaataaagaaattacaaaagttagttactcatcttccctttcaagagtccacaactttatcaatgatacacaatgaactgtttcctttttctgaaacttacaactaatgtattttgggaaacaggcaaatttaggtttgttgaaggtgttggtggctaaatcacccgttgaaggactacacgcaaatttaaagagcatggttgaaggcttactaaagtggccagaaggaacaaaaaatctgttcaaagcaaaggtgtgtttctgatatgtttttattaatacagaatgcccaagatgacatctttgatgcctagaatttgaatctcattaccgcaactttaccttctctcacacaactcagacgcacacatttatccatgttgagctcttgcttgtacataaaatttgtttcttagcggcaggcatatattatgatttgtttctgcggattcttgtcttttttttttaagagtcatgttggtataataggtgaggcttctgttggagatgctcatcaagaaatgtggcacggaggctgtcaagtctgtgatgcctgaggaacatatgaaactcctgacaaacatccgaaaggtttgctaacagtgttcaaagttgcttaaacttcagtatctgtattatgtcatatactcatacattttctcttggttcatctcagatcaaggaacgtaaagagaaaaaatatgcagctggctctgacatcagtaaatcgcagcattcaaaagatacttcatcaaagtaccttaccaactcaattggcatatggtctcatagaagtttctgagtggtcaagtactgattgtttttatttgggtcttccagggttagcaggtggaatgataccaagatattttctgatgtatacgcggacagtgaggacagtgacggagacgacatggatgcggagtctcatggccgcagcaaggcttcctctttgttaaaatccaaggcatccgctttgaggttggttgttatatacacattttggcactaatcttgtatcgctatgcttttggatctacttaaccgacgtgttgatgacatattacagatccaagaaaagtcggaaccagagtcatcttgaagtggatgagtcagatgatgaaccgcttgacttaatggatcagcacaaaacaagattagctcttcggtcaagtgaacttcgcaaacggaaagctgactcggatgaagaagcagagtttgatgtggaagggcggctagttattcgtgaaggagagaggtctaaaaggaaggaactatctgatgcagattcagatgccaaaagtagcaaaggcagccgtttctctggaaactcatccaagaagaaccaaaagcggatgaagacatcagagtctggatacgcttacacaggcaaagagtatgcaagcaaaaaggcaagtggcgatcttaagaagaaagataaacttgaaccatatgcctattggccactcgatcgcaagatgatgagccgtagaccagagcaacgggcagttgcagtgagagggatgtcaagtgtggtcaagatggcaaagaaaatggaaggcaagagcgctgcagaagcacttgccaccaccaagttcaaaaaattcaagaggagtggtcagaagaaatcagctgggaagaagaaaaacaagtaaacaagtggcataagctcctcacctatgttttaagatatcagaggaaaaatagcttatttaaaacacattttttgactgctaaaactttaaacacctttgtccattttgtattgtaatcagattttgaaatatggtttcagagttgatacttcaaagagaatttgtgaacgtcagttccggattgttcttggcatttgatccatctcagccagagtagttaagagcaaactatccttgaaaacgttactcttacgttaattatcccaaatctgatgatatccgtggttgagacagcctttactaccattcgtagagtgatttataacgtatcttgaacacgaaattacctaatcaaggatttgacttctactagaggatctctttcttatatatcactactggattaacgtagcaagaacagacttttggaactaatactcgtcttttcgtactgctcatagttctagacacgtaaattaaatttcaaaataattcatgattatattccgcttaataacatttcacaaaaaaaccaacctttttttttccacactaaaaagatattacgacaaacaattaaaatcgtgaaaataacatacatgttttttttcttctttttgttgaaaaagacactgtgatcccacaatcacatcatcaaccatctttggcggtaaacagtaaacacaagccgcttattttcaatccacacaccattcactctcagctcttttttttttttttaaggcactcttgtagtataagccacatttgtaagatgtcctgtccaaatcatattttcactgagaaagatggaacgtatagatatattcttagtctctagcagagtagagactttgatgccaatgagaaatacccagtcgcctctaatttgcatatattcttaaatttagacgtcgaagctactttgttgcttccaatgatttaatcaccaaagtaggataaaaatttagtttcaaaattatcatcttttgttttacaaaaatatatatagtttctctaaagaaagttcattagtcgacgcaaattagccacaatattatagcatgatacatttctagtccctaatataattgccggacggatttacgattaccgataaacaacaatctattaacaaaaaaaaacaaaacaaactagtattaacaacggatttcaaatcatcgttatatcacattcacaagaggctagaaatggattcgactgtcacttatcagctgttttcttgtaaatgatacatcactataagagaatcttccgtattttccagtctttaacgtatacaaaatcttctatttctataacaccgcctatatttaccaactagacccaaaaaaagagacaaattactatccggccgtaaacatatactaacaaaaattaatatgcgacacaaggcaacaatggtgagatgggttcatctcctataaaaaaaaaaaaaaagacacatgtataggtcacatgtaattgtcttcgtaaccttttttttttctttcttttttctgtgttgtctccataaccttaaaagataatataaaacactaatccctaacattacacatcattagagaaaccgaacaaaacacgaatccccaaagacagggataatccctaaccttttttttttctctcttttttctgtgttgtctccataaccttgcaagtactgtcgctcactctttctctctcaagagtctacattctctgaagcaaagggctgatgagggaggagagagaggatatgttgtcatggcctctgatcggagagaaagagaagagaagtagatttgtaaaggaggaagtggagaagcagctactgttgtctggaccactaatcgcagtgagtcttcttcagttttgtctgcaaataatctcagtcatgttcgtcggccatcttggctctcttcctctatccgccgcctctattgccacctccttcgcctccgtcaccggcttcaccttcctcgtcagttctttctatcaaccctctctctctattatcaaatcattctattcttttactacaaagttttttttatgagacaccgagaattattagatggacaaatatctagtaattcatttctttatagatattgatatttaattattttctatttagcaatgttgaaaattaccaatagttaataaaaaaaaagcgaaaagaagtgactaaatataaaaatctattaaatacaagatttctatgaattagaaccctatagtttaaacggctaattgaaaatttagaaacctaattaatactaaaaaatcttctcaaggaattgtatgatatatatattttaattcagctacgatgtagctatcaggccaccttttctgaatttccaagttgcgtatgcatatttgattcttctatgctactccaagaacaaaaacattttgtcattttaagaagaaagcgaaaacaccaaaaataaacaagaaaaagtgttttgtgtataaatattttcttttttcttttgtttttgctacccgcacatgtttacattgcatggtaaatgacatggagtatggacagtccaaattaactatctaacgatgtgaagatttacgttgaacacttacttgtaaagcaagaaatcttatcataagaaaactattcacctctgaacagatgggaacagcaagtgcgatggacacagtttgtggtcaatcgtacggagcaaaaatgtacggtatgttaggcatacagatgcaaagagcaatgcttgttcttactcttttatctgttcctctctccatcgtttgggccaacacagagcacttcctggtcttcttcggccaagacaagtccattgcacacctctctggctcctacgccagattcatgatccctagcatcttcgcctacggtcttcttcaatgtctcaacaggtttttgcaggcgcagaacaatgtaattcctgtggttatctgttctggagtcaccacttctcttcacgtgatcatctgttgggtcttggtgttgaaatctggtttagggtttagaggagctgctgtcgctaatgcgatctcgtattggctcaatgtcattctcttgtcgtgttacgtcaagttttcgccttcttgctccctgacctggaccggtttctctaaggaagctcggcgcgatatcatcccttttatgaaactagttattccttctgcatttatggtttggtaagtctaagaaaaaaatgccctacattaattaattattggacgtaacttggaaacaaggtttttatgaaacagacacattataagaaagcatggatatactatccaattgtccctatgtagtgataaaattagcctaaacctagttgagatttgaaaaatgttacatctcttattagtatcctttcctcttatagtatctttttattttggtgatgttgtttgagcagcttagagatgtggtcatttgagcttttggttctctcgtcaggacttcttccgaacccggttctagaaacttcttgtcctcgcaatctggcaagaacgatattaataattgttatctcttcgtcataattcagaaccaaatttagtcattaccttgtgattgagtgtggtaataaatttgccgccttaatacatcaggaaccgtctggatgatcccgtttggccttagtggcgccgctaggtcaataacaacactagtcattaattagtaaaccattccatatatagaaatcattcaacctcaatattactgttaattgtgcaaatccgcagcacaagggtgtcaaatgagttaggatcagggaatccgaaaggggctaagcttgcggttcgcgtggtcttgagcttttccatcgtagagagtatactagttggaacggtcttgatacttataaggaagatctggggattcgcatacagtagtgacccggaagtagtcagccatgtagcctcgatgttgccgattcttgccttaggtcattccctggacagcttccaaaccgttctttcaggttatttatatattcactcaaaatttctatacgcaaacctgtctttgcttgcaagttaaagcaaacaaccctactacaagcacatactacaagcaccaatccggttttcgaacggttatgttgtttattgtttttttttttctaatccggtttaaaggggttgcgagaggatgtggatggcagaagataggagcatttgtgaatcttggatcatattatcttgtcggagttccgttcggtttattacttggttttcactttcacgtcggtggtcgggtaataattcaattaaccaactctcttaactcatcacaaacttgttcaaaatcaatttaactcaaagttaaaacatgtagtaactaaagtttaatcttaaggggctttggttgggaattatatgtgcactcatcgttcaaggtgtatgtctttccctcatcaccttttttacaaattgggatgaagaggtaaaaccatcaccatgtttagtatatttttatttttagtagaaatgtaactatagattacggatatcttatagttaagtgattgttattgattatggatttactgattcttcgtttatttattcgataggtcaagaaagctaccagccgagctaagtcttcttcagaagtaaaggaatttgcagtagacaacgggtcaattcttgtttgagattctgagaggcggaaccgacgacccatatatgaagcctaaaacctttaaaaacggttgccacttatttgtagctaagaaaaataaactttgtgtacgtggattttcaaaaatataatcctaaatgttctagaagcttcctacatcattagggcttttctattgttacaaacaccgtcgttttttgttcgtagttttttttttaataagcgtaatcagccactgttgttgaacgaaaccaaaaaaagttatggtgagactagtttgcagccgaattctcaaatttccaaaaccgtacttatggagtgcgacgcagactacaagccgttgcttcaattcacgagcccagtctcataatctcatcacaaagacgatcacttcgtctcttcaagacgttttaacacgtcccatttggcaaaatcgaagctttgttcaatgcagaagagtctcttcctatgctcagatggttaataatcatcaatctgtgacgattgagacatttgatgctttgtgtaaacaagtgaagataagagaagccttggaagttattgatatcttggaggataagggatatatagtggattttcccaggcttttagggttagcgaaactatgtggtgaagtagaggctttggaagaagctagggttgttcatgactgcatcactcctttagatgctagatcttaccacacggtaatcgaaatgtattctggttgtcgatccactgatgacgctttgaatgtgttcaacgaaatgcctaagagaaactcagagacttggggtacaatgataaggtgcttagcgaagaatggagaaggtgaacgcgcaattgatatgttcacgcgtttcatagaggaagggaataaacccgacaaggagatattcaaagctgttttctttgcgtgtgtttcgataggagacattaacgagggattgttgcattttgagtctatgtacagagattatggtatggttctttcaatggaagactatgtgaatgtaattgagatgttggcagcttgtggtcatttggatgaggcgttggattttgttgagagaatgactgtggaaccgagtgttgaaatgtgggaaacactgatgaatctttgttgggttcagggatatttagagcttggggataggtttgctgagttaataaagaagctagatgcctcaagaatgagcaaagagtcaaatgcaggtcttgtagcagcaaaagcatcagactctgcaatggagaaactaaaggagttgcgatattgtcagatgatcagagacgacccaaaaaagcgtatgcatgaatttagagcaggagatacttcacatctggggaccgtttctgcattcaggagtttgaaagtgcaaatgttagatataggttttgtccctgcgactcgggtttgttttgtaacagtggaagaagaggaaaaagaggaacaacttctttttagaagcaacaagcttgcctttgctcacgcgatcattaattcagaggctcggagaccattaactgttttacaaaatatgcgaacctgtattgatggccacaacacatttaagatgatctcactgatcaccggcagagcactgatacagcgagataaaaaaaaataccacttttacaaaaacggggtctgctcctgcaaagattactggtaagctctatggtgaagaacctatcatctcctcaacctcaaatcgtgattttactcagcttggtagagattttgtttccttttaagtcctttagcatatttctagaatatgactgaatgtttctttcccagttcatcgcgttggtatatattggtttcttaacgtttcaatgctcgaatcatttcacattgtgacttgccattttactagagtttttttttttcagttttagattcgatgtatggttgaatgtcaacatcgttgtcctctgatataacttatctgagatggggttgttcgaataaatttcaaagaaattgcaggaaaggagatgaaactaggctgctatctaaaagagtagactcagaaataactggatacataacgtaagcagatgaaaaagacgatggaacagacatgacctgaagaaaacgttgaggtctctctgacgttgccttgacgtgcaagtcatatccgtatacattattagtgtctgacttctgagatgctctgttctatctcagtatctccttgaagcatcttcccaactttgatcattctctctgcctcagctatttctactttccttctagctttgggtctctaatcactgcaaaattccctttcgtataaagcaagaaatcctggaaagtaaaagagaaaaacaaacaaaccatgaagcagaaaagaaaatcaattttagaccgaaactttggagtctcatgtgaggagcctctaaaagatcaggcccagttaaagcccaccaactgaagaggcaacaaccgtcgtttaagccgacaacatgacggtatcaagctgtttttgggagactgtgtttgcgttgtctttgttttaagctatatgaagaagcttttctttatttgatcaatggaatcagaatcagaatcatcatcaacacatagcagctgcgatcgattcctagacgcagaagacgaattcttttacgatagcttctcgaaccactacgactgcctcaattcgtctccccccgcgaatctccgtcgccgaaggttgcctatggatacggattcttcttcttcctcttctacgtcttcattggaatcttgtgagaaacggagcaccgtgggagaaaatgacgagcttgaggtttctctagtggatttcgaaacaattgaaattgatgtcgatgttactgactctgcaaatagctcaatcgactcgatttcggaaaaaggagaagactttgaagtaattgactcgtgtaccgatacggagaagaatatgggtgagaatgattcgggtcgggtcgacccgtttacagtgaccaccttgaatgatgagcgaggtgagatttataccggaccggaatatacttcgacggattggtctttgacgagtctagtgatcaggtcaattgaatttcaagttagtttgatgattacctttataaggtttcctccatggttaattagtaaatgtttgagctttgtttttgatccgtatcgaacaatgaggcgtggtagacgctatttagtatcgtggattgttgggttatgtgattcagggttaaaagatgataagcctgtgttggagcttgtgcgtagagtaacatggggtttgttttgtgctgtttatgtggggatcatgttgtttgccttgttggtttctgcgtttatgattagtggttttgtgattacctatttggctcatgaaccacttgttatcaaagagagcttgaattttgattacaccaagagtagtcctgaagcttatgtgcccataagttcatgtgctggtgttgcctttggtttgagtggcaaggagagtattgaaactgggaaggtcaaagggttgaaagacaggacagagataactgtgtcaatgacattgcctgagtccgagtacaatagaaatctcgggatgtttcaggttcgggtggacttcttatccgcgagtggtcatgtgcttgctagttcaaggcggccgtgtatggtaaaatttagtagcgagcctatacgtcttgtccagactttgctaaagattgctccgcttgtcacgggctatgtctctgaaatccaaaccttgaacttgaagcttaaaggcttggtcgaaaaggacattattcctactgcttgcttgaagatcatgatcgaacaacgtgcagagtttcgtcctggagcaggtattcctgagatttacgatgcatctctgttccttgaatccaaacttcctttcttgaaaaggatcatatggaactggaggaaaactttgtttgtctggatcagcatgagtttgttcattatggaattacttttcgccttagttttcttcagacctctgatcatcccaagaacaggtcagagaacacaacaaagagatggaacacattctatcaacaacaacttatatcttgacggtcaggcgggaagtagatgaatcagtggttgactagttgttgtaacggtacttacacttactgtaactttaatatctttcttcaaccgaaattgtaatatcctgtctgctaattaaagtcgcattgtccaaatagacttataagttacgttcttgaatcgttttcataagtcggaatgatacagacttttaatttgatttacagtgtactttacacagtaacatatacatatgttctactttacaaccattttgtgttgataatgattagttacaatgagagcagcgaacagatttgaagatgcttgaccttaaagattgatctacatcatcacagaggaagatcggtaactcgtttatgagaagatcctgtcttggagaactcaggctctgcgttctgtattgacggtaacattttatgaatcaaggccccagagacggcaccaagtgttggagccagcaagtatatccaaatccctttgtaacatccccacacaagtgcaggtcctatgcttctggctggattcatcgatgctcctgatacctctctgtaaaatgaaagtttggattgttcccattggttagccaaaaagattcttaccattgaagaattttaacttgcagagattgagggggaaatgtgaaacttacccagcaaatataacattcagtgtgacggttgccccaatgattagcccctctagttcctctgtctgcaagattgataaatgttaagattgaaatttatatatatcatctgatcatgaagtgtttttggttgttgatcgcttacagttctcttggtggttgtgacggcacagacgactaacatgaggaagccggtaatgatgaactccatcacgaatgcttgaagatcagacccagaaggagatgacccgaggaagacatcatgtttcttgctgcacacatcattgttcagatcaaacagaagacgcagagtcgcagatgccaaggttgatccgatgacttgaacagttatgtaggccgggacttgattcagagggaatctttgggaagatgctaaggcaagagtgacagcaggattgaaatgtgcagagaggtggccgagacagtaaacaagaaccattatcactataccccaaaccacagcaatccccacaagagtcactacatggttgtgttgagcattcacggcaatggcggcacagccagcaaatatcagatagtaagttccaacgagctccgctaagagctgcagatcaaaagtgctcatcgtaagtatcagttaacacaaaaacttgaaaagcctatgggttaaaaagaagctttgaagagtgaataaagcagtgcttcctcaatttggactgagataaacttaccttttgcaagaaatggacagagagcaaaggcggggacgatgactcgtgtttgttggaaggaagagaagtgtctgcaagagaagacgctttgatgttgagcacaacaacatttccgtggttgcttttgctcactgatatgtcatccatttttctttttgtccgagaaatagaaagaaaaaaaagttctgtataagctttgattgatgtttgaagttatgtgtttgagagattttttttttttttttccttcttgtgtgtttgagagattgtaatgaggtttcttccttttatagttactttaccaaaaccaaataagcagactgagaacaaagtgaacaaaaagtcaaattttgcttttcagcaacttgctaaaccaaaatcatagtttatttagtgtatatttgttttaagctgaatactgctgaattgcagcagatggttttggagagcaaaagacacaggtcgacccgaaatagataatgtttagaaagagtcaaatccaattcttgtttctggtttaacctaaaccgaggctgacttgtgcaccatttttaattcctgtttgtactctttgactttatgagtttgcaaatgctcatcaaaccagagaaactagcgttctcgatttaccgccaatttcctaaattcaaacctagacaatttgaagaagcacgacgcggcgatctcgagagggactttcttttcctgttgaaaaaatgtatctccgtgaaccaattgcgacagattcaagcccagatgttgttacactccgtcgaaaaaccgaattttctgattcccaaggccgtcgaacttggagacttcaattactcctcttttctcttctccgtcacggaagaaccaaaccattactctttcaattacatgatccgagggttgaccaacacatggaatgatcacgaagctgctctgtctctgtatcgacggatgaagttttctgggttaaagcctgataagttcacttataattttgttttcatcgcttgtgcgaagcttgaggagataggagttggtagatctgtccactcgtcgttgttcaaagttggattggaaagagacgttcatataaatcattctctgattatgatgtatgcgaaatgtggtcaggtgggttatgcccggaagttgttcgatgaaattactgagagagatacggtgtcttggaactcgatgatctctgggtattctgaggcgggttacgctaaagatgctatggatttgtttaggaagatggaggaggaaggatttgaaccagatgagaggacgttggtgagtatgttgggtgcttgctcacatttgggtgatttgagaactggtagattgctggaggagatggccatcaccaagaagatcgggttaagcacgtttctggggtctaagttgatcagtatgtatggaaaatgtggtgatttggattctgccagaagggttttcaatcaaatgattaagaaggatcgtgttgcttggactgctatgatcactgtgtaagtcattgttcgacactgtattcagataaaagtatgattcttaaacccgttaatgaagctaaatttggactgttttggttgttctttatcagatactcacaaaatgggaagtcaagtgaggcttttaaactgttttttgagatggaaaaaaccggagtttcaccagacgcgggcacattgtctacagttctgtctgcttgtggttcagttggagctcttgaattaggcaaacaaattgagacccatgcatcagaactttccttgcaacataatatctatgtggccacaggactagtcgacatgtatggaaagtgcggacgggtagaggaagctctgagagtatttgaagctatgccagtgaaaaacgaagccacttggaacgctatgataaccgcttatgcgcatcaaggacacgctaaagaagctcttttgctgtttgatcgaatgtcagttcctccaagtgatataacattcataggagtgctctctgcttgtgtgcacgcgggtttggtccatcagggctgtcgatatttccatgagatgagttctatgttcgggttggtcccaaaaatcgagcattacacaaacataatcgatctcctgtctcgtgcggggatgttagacgaggcttgggagttcatggagaggtttcctgggaagcctgatgagatcatgttagcagcgatccttggagcatgtcataagagaaaagatgttgcgatcagagagaaggcgatgaggatgttgatggagatgaaagaggcgaagaacgcaggaaactatgtaatctcttctaatgttttagctgatatgaagatgtgggatgagtctgcgaagatgagggcgttgatgagagacagaggcgtcgttaagacaccaggatgcagctggattgagatcgagggtgagctaatggaatttcttgccggaagcgattatttacagtgtggcagggaagattccggttcgttatttgatttgttggtggaggagatgaagagggaaaggtatgaatttggttacattcacctgtgactttctcggagagtgcaagtctagtaaaatttgttgtaaaataaatttgaagttttattttgaatgtatatgaaacttaacactaacaattaaaattactttgaatctataatagttacgtctctctctagttattatttaatcattcagtaatcaatttttttctgttggtattgtaatcaccgattcttaaaattagtagagaaaggcaaaaaaaccgaacggaccagaaaagagaacattcgccaaaccaaccaacaaccgtttgggtgagcttgacgagaacgacgtcgcacccgccattttctccatccttgaagcaacaccttcttcacttcagatctcttcttcttcttcttcttcttcttcttcttcttctttgctcgcaccttccgtgctattgtatttctagggtttcggatcctgtgccttaccttagatccgacggtggagtagaaatcactctccctgtctcttcccttcttttttgtttccagtttttgattgaagatcccttcgtggatccactataatggcggattctcagccaatcacgcctggtcaggtacggtatctcctaactttgtttttttttgaagcttcagcgtcttcttaaatttcatttttttgctacggtttcaaggatttgaaatgaatagtttctgttgaacgagatttctactataatcgataggttgtggagtaattgaatttacaatttggattagtttactagagggatcaaattttgctagtgtcttcaaatgtagtagctttcaactttgaattttgaaaatgtttctcaccagagatttggtttggatgacctttcatatttctttaatgcaggtttcgtttctactcggagtcattcctgtcttcatagcatggatttactcagagtttctagagtataagaggtcttcattgcactctaaagtgtatgtatcaggactctaatttaaatggctctcttgttatatgtatctaacctcttagtaacctatacttcttacttgcagtcattcagataataatttggttgaacttggtgaggtaaaaaacaaggaagatgaaggagtagttttacttgaaggaggtcttccaagatcagtctctacaaagttttataactcacctatcaaaacaaacttgattaggtagttttactgatttcttcctttgtgtttttttgtttcttagagtggagtgttctttcaacaaacataaaccatttacgtttgtctacttgtagatttctgacgctggaagactctttcttgattgaaaatcgagcaaccttgagagcgatgtaagttccttaattttatcagaatggattcatactgttcttcattccctctcatgaccgtattacttcctttcagggctgagtttggggctattcttttttacttttatattagtgatcgaacaagcttgcttggagagtctaaaaaggtgcctcctttaaatctatgtgatggattcttttctcagtttcaactggtcatcaaaattctaaaaccatttatgtgttatatatagtgttatagcacagatgtcgttaatagtttagagatagaaatctaacatctgagtctaaaaatggttctgcaatttgtgacacttttttcgtatactttccattttgcagaattacaacagagatcttttcctctttctctactgtcttctcatcatagtttcagccatgacatccttgaagaaacacaatgacaaatcacctataacaggaaaatccattctctatcttaatcgtcaccagactgaagagtggaagggatggatgcaggtaactgattcagtattttctcagtaggtgaccttaacattttcacatgtttttgctcctgcttagcagaatatatctgagttttttggtatcacgtttagatgttttgtgtgtgttgcaactgttttccatgctaatttacagtttttgtgtctttgcaggttctatttcttatgtatcattactttgctgcggctgagatatataatgcaatcagggttttcattgctgcctacgtctggatgactgggtttgggaacttctcttattactatatcagaaaggatttctccctagcacgatttactcaggtcatttcaattgcacagttaattagttgaccatgatatatgcttctaagggacatgttgttttcaatgactcaagatgctcatgaaaacttttacttcttccagatgatgtggcgtcttaacttatttgtggcgtttagctgcattattctcaataatgattatatgctgtactacatctgtccaatgcacactctgttcactcttatggtgtatggagcccttggtatcttcagtcgatataacgaaataccatcagtaatggctttgaagattgcttcatgctttctcgtggttatcgtgatgtgggagattcctggcgtttttgagattttctggagtcctttaacattcttactgggtcagtatcagactcttctcatatcttttactgtgttcggcatggtcgactgcatatccgtcttgtgctaaaaaaatcctgccaatgtttgttgtcacttggtcactggaattagtgtttttgtatgttgactaacatttagtttttttccttacacaagtacaggatacactgatccagctaaaccagaactaccacttttacatgaatggcacttcagatcaggacttgaccgctacatatggatcattggaatgatatatgcctatttccatcccactgtaactcttgaacctacagccttctcgttttttcatatcttctcatgaaccctacgattaaaatattttttgacattttcatttcaggtagagagatggatggagaaattggaggagtgtgatgccaagagaaagatgtcaataaagacaagcataattgcaatttcctcatttgtgagtttgggttctctctggcttatggatcttatgtatttgatattattctgatgcccaagttgttccctatattgttcaggttggttacctatggtatgaatacatatacaagcttgacaaggttacatacaacaaatatcatccctacacatcgtggattccaataacgttagtatcaaatcccgttttctttcaccccaaacattaaactttgagatgtcttactctctaaattctgactttagctttgattattttgtcttagcgtctacatctgtctgcgaaattctacacaacagctgcgtaatttctccatgacactatttgcgtatgtttctcaatcttagtctcattctaaccaagcttagtgttttattctgtacacaactctaatatgacatgactgtcatatcttcgtaggtggctcggcaagattactctggaaacctatatttctcagtttcacatctggttaaggtcagcgagaaactgtttcctttctcccaattatgtaggcaagagaccatttgtctgaaggatctaggaatgaaattttaactgcaaattatgtgttctgcagatcgaatgtgccaaatggacagcctaagtggctattatgcattattccagaatacccaatgctcaacttcatgctcgtcacggccatctatgtcttggtaaagcaattgtagaatccatgaagaaatcctgtattcacgatacgttctattattgtaatatgttcttttgatttattttcttcaggtgtcccaccgacttttcgagcttacaaacacgttaaagtctgttttcataccaacaaaagacgacaagaggctgctccacaatgttctcgctggagctgccatctcgttctgtttatatttaacatctctcattcttctccagatcccacactaaccatgtaaggccttttactttgcatggtccattgcagccattgttgatcttggtgtgtactcgcttaggaagagatacaattctcgattaacacgctataaccattttattttgacaggagggactagaaacatgttgaaaaacatgaatctaaagctgcacagaggtttctatgtgaaacttgctaaaatagatacaacacacatctcatatcgacaataaaaatttgttttcaaagatcagtattttttgaagcttgccaagtgaagcatcttttgggtaattagaaccagagaagcttcaaaaaatggcttagagtgaagcatcttgtggcatttcgacggcatcatcttaggacgacttatcttgttcgttttctttctcgtctctgttgtaattttgctataagtttctcatatatagtttcattttgtcttttgttcgtccgtatttggtagtttgtccaaatacagaacatatgaattttacaagagtggatatttcaattcaattgagtcttcagataaaacgccaacacagttagagaaaaagaggttcgatttctatacaaagataccacaaaggaaagttcacaaatttacatagaatagaccacaaacaaactctctttctctgctctcattcacataataagcagccgctcactttccggggacgaagttggtggcgaaggcccaagcgttgttgttgactgggtcggccaaatggtcggcgaggttctccaaaggtccctttccggtgacgatggcttgaacgaagaatccaaacatagagaacatagccaaccttccgttcttgagctccttcaccttcaactctgcgaaagcctcggggtcagtagcgaggcccaatgggtcgaagctgccacctgggtaaagcaagtcctctgcttctcccaatggaccatctccggcgactctgtagccttcaacagctcccatgaggataacttgagtagcccaaatggctaagatgctctgagcgtggaccaagctcgggttgcccaagtagtccaatcctccgtcgctgaagatctgtgaaccggccttgaaccaaaccgcttctccgaacttcactccgttcctagccaatagctcagggaaaacgcagcctagggctccgagcatggcccatctgctgtggataacttctagctcacggttcctggcgaaggtctctgggtcggcggatagaccagcggtgtcccatccgtagtcaccggggaactcaccggtaaggtagctcgggggctcgccggagaatggacccaagtacttgactcggtcagatccgtaccatgggctgcctgatggaccctttggcttggcgacagtcttcctcatggtcacacggccgcttccgaggacatctgatgcggcaggcttcacagcctttccggcgaaggcaggggaggacaaagccatggttgaggaagccattataatctttgtttttgtgttttcttttttttggttgtgactggtgagagtgattgaaaatggttggggtatacgtccactttatagcaatgttaagagtaaggtttgttatctgtgaagtatctgtatctgtttagtgattggcttatgagattttgggattgtcgttatcttgtcctatgtgtcactctctagtccataagcttttgctagattctttagctgcaacgaaaacacttgtcatttgtacacaaagaaactttggggaaattttcaaagataaatgcttgaattattggaaagaaatatttgaaattattccaatctatttttttctttttccttgttttctttaattccaatccacttcatgctctcaataatattttcttttttttcttatcaagtttgtttcgaacgccaaactacaaagtttttaagtgaaactagaaacacttaccaaacaaatatatatcaatgttatgtaaaacaatgcagttagatgaaacaaaaagtgatacgaagttcttacgatcataagttaataatataaaaccgtcgacaatgatattaactgatacctttgattgattttgttgaatgttttcggcaacaaatatgactggtaagtttttcttgccaatacgaattagaaaacatgtctttgaagatgaactgtattttttttttttactttgttgtcattttaatgtactttcttatcaggattaaatcttctgtaatttagagtagtttttttaacaagataattaacaaacttagagtaatgaaaattgagatgttcagttttcactcatatttcacattttggtgaaagagtgggtagtatgcaacgttctaagtatgtttggactttgtatcatgttgttttgattctttgacgacatgtctatttgggaaacaccaatgacgtgtaccttgagactgatacgattcaaagggatagaaacacgtcagatttacaagtggcacgtcttcaatggacaatgggtattccaatatgctaagatgctacgagatatctaatttatctaacacaactcaattccaaaccaaaaatctgatgccagctcgacaagacaaaaaatctaagctcaaaaatgtcaacaaccaatagaaatcaaggcattgacgatatcacgagataagcaaattaaatcttcaagttttgcaattcatatgtacgttataaatacccaaaaacctcaccgtaacctagctatccaatttcatcacatcttattaactaaagagccttttacttgcgccacactctcaccgcaatggccgcctcgacaatggctctctcctctcctgctttgaccggaaaggccgttaagctatccccggcggcctccgaagtatttggaaccggccgaatcaccatgcgcaaagcctccaagcccaccggtccatccggcagcccatggtacggatccgaccgagtcaagtacttgggtccattctccggtgagcctccgagctacctcactggagagttccccggtgattacgggtgggacactgccggtctatccgccgatcccgagaccttcgctaggaaccgtgagctagaagttatccacagcagatgggccatgctcggagccctaggctgcgttttccctgagctattggctaggaacggagtgaagttcggagaagcggtttggttcaaggctggttcacagatcttcagcgacggaggattggactacttgggcaacccgagcttggtccacgctcagagcatcttagccatttgggctactcaagttatcctcatgggagctgttgagggctacagagtcgccggagatggtccattgggagaagcagaggacttgctttacccaggtgggagcttcgacccattgggcctcgctactgaccccgaggctttcgcggagttgaaggtgaaggagctcaagaacggaaggttggctatgttctctatgtttggattcttcgttcaggccattgtcaccggaaagggaccgttggagaacctcgcggaccacttggctgatccagtcaacaacaatgcatgggccttcgctaccaacttcgtccccggaaagtgagtttaatttgtgatcgagttgtgtgtatccggtttgttgcatcttggaaatgtgatgcagatttcatatcttgtaaattactttgtatgtgtgtgaaatatttaagaagctttatgatattgatggatcagtcacttactatttactaatgtgcaagaacatacttagacctaattcggtgttcacacaacatagtttggttccaagaacagagataataccaaatgatttgatcgtaccacatcaaagtccaaacaagtttgtttttgttcttcaaaataactaaaatatatctcaaaccatccttatatgtttttaacttttttgtctttcacttttggtgtgacttcttcaatcggattttgatgttgcattgttgagagttttggtgataaggaatccaaagtcttggtcataatttttctcttgttcaaatttaattgcacggaatttttcatgcaatttgggtgtgtttggtatgcaaattgtcaaagactttatttttgataatgtagttcggagtcttgaaagcatttgtaggtcttatggtcgacgctcttgttttaggtttctaattaaaaaaacatggttaagttgaatgtgactgaactcataagtcattcgagtgactcgcaaacctttggactcctgtcctcagtgggcattcgcaaacaaaaacgtttgaaacggtccataactttttattttaattcaacgacaccatttgcaaaaacttttgaactacataacatggtcgataacttattaatcaacgagaggtctacaaagaagaaaaaaaaaatcactttggagaataacgaccagaatataaaataaacttctaaattttgaattacataaaaaaaaaaaaaaaaagaaagaccaattatgaataccatttttaattctttacaaggtaatgaatcccatcttttgtctatgttcttaagaaataaagggaaaaaatatgaattgttaaagattcatgtatgttttgaatacacaattagaaactattcaatagaaaaaagaaaaatgaaaatttaaatattcatggatgtttgaatacacacaattagaaactattcaacgcccatataaggcaattcaagattttcaattaaaaacttgctaaatctgcacccttgtgattctccacctccattactatatatgaccctcgttaggttcaatgaaaattctctacctccatctccattactaaaaacagagacatacaacaccaaaatcttcttcttcaccaacatattcactttcacagcaaaaaaaaacgagaggttctctcttattcgtaccgttttagcaaacaaatgggtcggagaaagatcaagatggagatggttcaggacatgaacacacgacaggttaccttttcaaaacggaggactggtttgttcaagaaggcgagcgagttagccacgctctgcaacgctgagttgggcatcgttgtcttttcaccaggaggcaagcctttctcctacgggaaaccgaatcttgattctgttgcagagcgattcatgagagaatatgatgattcagacagtggcgatgaagaaaaaagtggtaattacaggcctaaactgaagaggctgagtgaacgtctcgatttgctcaaccaagaggttgaagctgagaaggaacgaggcgagaagagtcaggagaagcttgaatctgctggggatgagagattcaaggagtccattgagacgcttaccctcgatgaactcaatgaatacaaagataggcttcagacagtccatggtaggattgaaggtcaagtcaatcacttgcaggcttcgtcttgcctcatgcttctctccagaaaatagctagaccgacttgttagagttacattctattttttgtatcagcctacagaacttaccaacacatgaaagttattgctggtgtagaattttctgtcatctatggggtgtgactttctatttgacatcaaatgaaaatgtacctggaaatttgtctgtattaatctcaagtgtacttgctaaacttgatcagctttttcgtcactctgcagtctggaatttttgtttcaaacagaatcgagacaataaaaagaaacagtaaaaccctttggcaaccactcaagaaactggttagtattcattgatctccaaatgcaatccacagaaacatgagtatcagtgaaagaatgatctcaaaaacgaaacagaaactcttaaatatcaccgatatacaaacccatcctagaaggcttagaacaatgtttctaatgtggtagaaactaaaaagtaatctattcagaatagtctgagtcggtctctgattcatcgtgggcacctgattcctgcaaaatagtaaaatgaaaagctcagactaatgttttatcaccgcatcagtgggacactgatgtgaataaatattaagcaaaaacaaggaaaaatgaagaacccactgatgtgaataaatattaagcaaaaacaaggaaaaatgaagaaaacggtggtaccattctcttggtatattctgtcattgctcggtgaaattcttccctcttctcagtagctatatcataatactttaccttttcctacaaaacagttgaggaacaaacaatctaggagtaagaaacttccgtcaaggtctcaaccaaagatatctaggtaagaagaataaaatgagatattgttcgccaaaaagaacaagactggcaacacctgactcattttagaacatatctatccaaccactatatatgctaacatgaaacctatttcattgcttttgtgagtcatcccaatgtcagatatcatacatttgactatgatttgaataacattatagaggagacttttagaagatagagacaatagactaactgggacagaaaagcgaaacccaaatgttacctcgtaagtcattgttttccatttctctccacatgtcttcccaatctgtacagaatgaagaacaaaacaactttagcaaaagaatcaaagtgaacataatagccaccatgttttactttgacatacaaaaccaacaaagtaatattctacaacctcgcgcatggacttgacatctggattctcctcttgatattgcttccggaaatcatccctttggagccaaaaagataagacaatatgaggcaagaggaaaatgaatacaacaagtgtttcttcgtatgttttctaaagtaaccagaacacataacaacataaataatcgcatcctaaagaccaatggcaaaatgcacacaaatttctacttaagagaagacttaaggaagtccagctgagcttaaatatttagataacaatttggaatcatatgagagagagtacctacaggaaaaagaagaaagcagtggcaggtttcttgggcatcttcgtttggagtttaacgggtttcttcttggggcttgtctttggctttctcaaaggctgaagtctcagtcttgtagacctccttgcaccttcacttgacttcacagccaactctaagttcctgccaagattttacaacacaattaacaaaaatctaactaacatcctctttccttgctcttcttctcacccatttgccattggatagcataaagttcacaactttcatatccaattccctatctaaccacttaatcagtaataaccagagagactaagcagaacccttaaaccctaaacagagaaatcaaagcaaaaccaggtgtaaaaagccaaacttgttctgtaacctatcaaagccagacacaaaacttaccgactagagcctccgctgcacgacggagacaaaggccctgacttgggagctctcttcgtcattttctctcactttctcggaatcgaactttcgttcgctgcctctttggggtttttccgtaattgcgtactgaaacagattgtcggagacctttgccacgtggcgtaatctaatcaacaaaaaaggcaaagatcaaaaatttacaatttaacaaaagttaacgtttgtggcagagaggttacacatcgatggcaacatctttgcttctcagacattcctcagctgtcttcttctctcagtcttccttcttcaccaagaacaaatcttttcgctcctttacttccatcaaagtaagatttatctgtaataaaaccattgattctagaatcttgtattgaattgtgtgtttagatttccccaattctgaaattgactttgcttgtttgtatctcagatggaaaaaggtgaagcagagaatgcagtgaagacaaagaaggtgtttgtcgcaggagcaactggacaaaccgggaagaggattgtggagcagttgttgtcccgtggctttgccgtcaaagctggtgttcgtgatgtagagaaagcaaaaacatctttcaaagacgacccgtctcttcagatagtatgttcttggtcttaatccaatgttttctcgctctcattttctcacaactgctctgtgatttcttctataggttagagcagacgtgacagaaggtcctgataagctagctgaagttataggtgatgattctcaagctgtgatttgtgctactgggtttcgtcccggatttgatatattcactccttggaaagtcgataatttcgggacagtgaatcttgtggatgcttgccgtaaacaaggagtggaaaagtttgttcttgtaagctccatcttggtgaatggagctgccatgggacagatactgaaccctgcttacctcttcctcaacctctttggactaactcttgtcgctaagcttcaagccgagaagtatatcaaaaaatctggcatcaactatactatagtaaggcctggtggtcttaaaaacgatcctccaactggaaatgttgtcatggagccagaggtaaaacacagcctttgatatttgtttcatctgttttgtgctggaaactgataaagatctgacctttgatttttgtaggatactctatatgaagggagtatatcgagagacctggtcgcagaagttgcagtggaagctttacttcaagaggaatcatctttcaaggttgtggagatagttgctcgtgccgaagctccaaaacgttcctacaaagatctatttgcctctgttaaaggacaataaactagaatgtaatgagtctcatgctcaaaccttttatttctcttatgtcttgagtacaacaaacagattacatagacttttgcgcataaattgagttcaagataagtattgaaagagttccattcagtttcatatcttatccattttgggtcttaagaaccccatcatcactggcgcttcttcccggtcgcatgttcccatgagtgcatgacatggttcacgatttcctcgactccaagcccatgcttcacctgccaatgtttagtaatcaaagaagactcttttgtaagtactaaggtcattggttatataagtgatgaaacatatttctgaagatggcgaacctgagcaaagacaaatggccctccatcacgcatgcgtagtgaatccctttccatgaccgataagtcagccccaacagctgctgcaaggtcagtcttgtttatcacctgcagttggaaaaatccacaagagattctttcacactactatagacttgatcaaaaggagtaagtgaagagttaaggcagcataagcgcaccagaagatcagcttgagtgattccagggccgcctttacggggtattttatcaccagccgatacatcgatgatgtagatgatatagtcagctagttctctactgaaattagcagctaaattatctgcaacacacaacactaagcctattcatatctcattggttccttgagaaacagaaatctatatatcgtgcagattaactatcaagaactagctagaaatgaaacctcacctccaccggattcacaaagaagcaaatcagccttgaataagttagataactcctcaagaggacccaaattgatactgatatcttcacggatagcagcgtgtggacatccacctgtttcaacagctctaatcctttcctcaggaagagccccattcttcaccagaaactcaccatcctctttcgtgaatatatcatttgtcacctacaacgtttacaatatcaaaatcttatttagtcacatgagtgagatcgagaaaacaatcttgtgtttgccactgataataatactcacagcagcaagactatatttgtccctcaagaatctacaaagagcaagcatcaatgccgttttcctgagtcaacaaaaacaacaatccaatggtgattagactaaaaagtttgacacttttatgaaacccaaatcttaaaatagcattccaaagaacccagacaagaacattatcatagattcatgcttaatccttaacccagagattaaaatttgttacggtaccaaattacaaaatcaagcagtaaatttgatcatgaaatgattacccagtgccaacgggaccgccaataccgacggtaaaagctctctcagagaagttacggtcgtgaagcggaggagctcggcgactgaagtagccaggagagtagatgggttcgtgtgagtgaggtgcgagtccatcgtggctatggtacaccttcccgtccttccccacccacgacgccttcccttctccgccgtctgatttcctacttgacagaagaagtagagaaacagattagtgaggggaataaatcgtatcaagatcagaactttacagagaaaatcaatgataacacgaactcgtggtcatgctcatgatcgtgatgatgatgatggtggtcgtgtgatgccatttccgagagactcgaatcttcttccggtagctgtgttgactttgagtagagctactactgggattctgggatcattaagcacagtttttaatgtaagaatctttctatatttttctatcctaagtgaaaggagatgctttctctgtcgggagcataaaatgactgtaatacccctgtcatatgttaagtgtttgaaggcaaaattacagtagaggaaacgtattttaactgacaccaagttggtatcacagtccaagacttaaaatctttcactttaaagaagcgatggttgttaacacaataaagagcacaaaatataggaattaagggaaaggttttttcataagtaggaaacaagaagcataaaatccagacaaagtcgagttcacattcatgagtacgcctaacatattgaaaaacaaaaataaccgataaaatccaaaacgggagagagcacagcttcaacatcgattccaccccaaaaaagagtcaatcagagacgttttacatgaacaagttgggcttgttggccttgtaagtcgtcttcagcttcctgcttggtggtctaaccttgcggaacaccaatgggaacttgatcttgctgttgtggaactgtttagtgctctctctcttgcacagcttggctgggacagtggctgtcttgatgatctgaatgcaagggaatctgacacggtgacgggatgccatctcagtgtacatctgctcaacagctccgttaagagtggtgtcacggtactccttgtacatgttgtggtacccagttctactctggtacctcaaccaaataccgaagttcttgatcgttgttgggttcttctcatagatctgtgcaaacaatttggtaatagattacattagtcaagagaggggccaaggagcaatcaaacaatataaactcatgataaaaacgtgatatggtttcaatttcgattcaatagcaagtcgagagaatcaagtaagagactttggtgaatctaagttttctcatttgatgacagacagcaaatgaaaagtattaacctagactaacagacaaagaaattatcagaatcagcaaaattagaagtatgatacaaatagattcaaagccatgagagatttgcatgatcaggctatttgaaagttacataaaagtattgtataatagtcaggcaaacaaaagactctgcatttataggttaaacaaagacgcaaacgtgatcaatcaaaaccctagtgttctagtcaagcaaatacattcactttccagataaatgaatctaagtgcctaactcaataagatataagaagtcaaacgagattgcgtcatttcacaaatgaacaagtacctcgttgatggcgagcatctgtccattactcttcttcaccttcttgagcttcctcaagaaatacctaatccaaataacacactctaattaaagatcaagctcatatcattctcagcagcaacaaaaatggaaaagagagagagaaagaatatgattactaaccagaacttggacttggcacgaacctcgttcgtagcccagagcttcatcctgtaaatcttaggctgcacatccttctctgtcgggagagctcttcccacaacctggtactggtgaaactgcaaatgaaaccagacaaagcttagatcagattctttcttcgagtccgaaacttgaatcagcagcaaatagtgtcattgaaatcaacaaggaatcaaagagcttaccctgaaagcacccatttttcgtctggagagagacaatgcggtggaaacctcaaccaaatataagcggctagggttcttcttctttataaatgagcatctgcccaaaaaccctaattctaaaactgatatcataaaagcccaatgggctgttaattgtaatcaagtcttagcccacccgaaatttggttatttcctcctcctcattttattatttctctctagtcaaatttttgtagcaagtttcaatattatatccttaccaggccaaatagtgcacacacacatacgggaaaaaaaaaaaaaaaaaaaaaaaaccattttatttgaagaggggtgaaagtgaaaatcattaaccaaaaaatatgaaagtgaaaaactaccaaactttatctgtttaaagcaaaacgacagaagacagatgtgggttacgacaaagcccaaacacacatatataggtccaatccactctatagtagcattgtgagatccaacgaagtaaattagtgggtgatgaggacacgcaaacacgagcgcaagaaagaaaaaaaaaaaaaaaaggtaatcaaggtcgttattgcatactgtgtatctcacacattcattgcataattgtgacacgccaacgccattgatgaagactctcgacgatgacaaaaggacttgtatatgattaaattgtactgtttaatcaagatgctcagcaactcctatccaaacataattgtttgacaagaaatcaatacatatgtcaaaatcatatgtcagcatcttcagatatatttttcttcgcattgtaaatattagcaattaaatctcattctcattaatttagaaaataatacaattgggggtttatatacaacttaaccaaaggcttaaaccataagccataaaccaaaacttaaaccaaaactaagattaatttatagaaatatcaatctgtacatactctctatactataagataactatatacaataatagtaaatcttctcagtttttacgtactttgcttttatggctaaattgtaaatatcattaaaataaataatcaggtcttaaactttggttagtagctagaacctatataattgaaagtgtgaaaccttgacagttgacacaaaaagagaataaaaaactaggaatcaaattttttctaagagaaaacatgggtgacttcatggcaaccatagtgccatcaaatttcggaattgtttactttgcgacatcaacactttactacacctatcgtcacagtgttattttatcttgctaatcgtatagataaaatattaatattaattatcttacaaaaatgtaaataagaaaatgaaatgtaaaaatctaacaggaactatagggttgtatatgtatattagtatatcttaacgatccaaatgtacaataataccgagaatgtgtgaattcttttacggttttggctttctgtcgttatataccacgaggcgatattgttatctctatttgaatcgaaaaatagagaaaatgacataaaatacatgaaacacgttatagaatcactggggtccaaacaaaataagacagtacagattaatggcaaaacaatgacttctcaaattcaacaagacataacgctctagtggaactcacctcacgagacacatcacgatcacgaacaacaataatagtaatcacactcatgagtattgactttgatcaccaataatttgtaacaaaaatccaaatcagaggttcggatacgttacgatgcgcttagacaagaacaccgtgcacccgtcctttggcgatatcgtgggacagtatatgatgtcatcgcaaccgtccgattgaagtctcttgaaatcaaacaacgatgagaacatagcgatgaagagcacgaggtggttcaatgcgtaacgctggcctacgcattggtgtgcaccccatccaaaagctaggtagtttcgtttgaacacttgatcctcttgccttgtctcactaaaccggtccggatcgaaccggttcggttcagtaaacccttgaaacgaggcgtcgaaaaccgagggaaacactattgtaccttttgggatagtgtacgattctgtaagagggaaatcattagtagcaatgtgtgggaccatagttgccggtggtcgatatctcaccacctcacgtgccacagcgcgagtatacttcatctccgcgagctgatcggccgtgatcagatggccagactgaggtgaccaaatcttggccacttcctccctcactttgctcagcactttcggatgagattctagaaacgtcaccgcccaaaggagtgatgacgtcgacgcgtcttgtgcggcaaagagaaaatcgaagagcaaaccgccgatggcttcgtcttcggagtgaagcggcggtggattaccggattctatctccgtgacgaatgcatgcatccaaaaatcgattaagcatgttggctcctctcctgtagccatcctctttttggattttcccgcacagacggagagcgtcttctccaggttcattaccgcccggcgagccttgttgaacgcaaagccgggcaggttgatcgggagcgccatagatccgagattgaacagattgtaatcagtacagaacgtgttcctagcttccttgtcaaggtagggtccaacgaaaaccgtttgagaagtctcaagattgagttcacggacaaggtctcgcatagaaaccggcttagttccgccggagaaactttcctcccactgtcgtagatgacggagcataactatttgttggagatcagagtaagtggagagtgccttgggggtgaagttaggagcaaggtgacggcgaacagttttgtgatcctcaccaaacaagtagattaggctatgatcaccgaatagttgtttgccaaaaggatgtcctagagggtgaaaagcttcaagacgaacgttggagaatatttgatgagaaagctctgtgtctctgatgtagatgatgaatttgccgatgaggtagttagcagcgaggccaggggaagtgcctgccgtgtcggattgcttgaaccagaaggaagtaggatcacggacgagtgaaatggcgtttccgatgatcggagggacaaagagaggaccagggaggttacgtttcttgacgaggtaagagagctgctcgatgagaaagaagagtagtaacgcagagactaagtacggagcgagagaggcaaaaatggaaactgagaaaaccatccttttttttcctcttctttcttattagatcttctcttaaaggtttctgctctgtatttgagttttgtgaatatgcagtaaacaatatataagggtatgacactctcttagggcctggcttattttaacatgaaaaccaaaaattacataaaggctatatatataaaagctatgattgttaatacagtttccactgtaattagtaatttgtctgatacatacgtgaaaatatatatggttggtgtaaccaacttgatgttttttttttctaaacatgtaaatattattaataatgaaaatatgctttacaagaagtaatacatacacaagtgtagcgaagtaaaaaaaacaaacaaggctactatataagaaaaagatttaggaagattggaatccaaagaagcatgaatgtacgccaactaacgtgatgttacgacaatgacatcaaacagtcattagctactagtctctatattttcaatattatggtatattaactagtaattgtgaacaaatgtagtcagtagtttttatatactctgtttttttattaaaaaaaaagtagagagattttttttgttatatatataatctgtttgctatattaataagtagtctttgaatctgcacctaactaaaccaatagtacctgtttacatttctcatacagtgtgctctcgtgtcaaaatgcatgcatgcgttattgcgttgtgtcaaattcaaaatttcggtttcgtccattaaaactgaatgtcttttttctttttggtttaattaaaacgtaatgttactcttatataacaccacattaacttcttttcttttgaattttatgttaaattaaattcaaaaagaagtgatcaaagttgttacaagtgctaacgagagtttaggatcgttcatctaaatcatctattacaaaaaaaacattttcagcttaattggttcttcgagcttagagccatacctgaaaacttttgtcaaatcttcaatctctactctgttttacaaaaaaaacagttaactcacaatgacatgcaatttacaaaaaaaaataagataaaaaaatatgagtatataaaaaatgtttatagaaatattgcgtgtagttaaaactaacaaactaatgtaatgtgattatataattttcttctattaaacagcagagctcgaaaggtacgtttataatcattaatgtaatgtgattgaggctatataatcattcatatgcaagtatttaaattactcctacagttacgagaacgcaaataattcattgcaaagttgattggtaggtttgtcactctggtcaagtgctgatcacgctttgcacgtgttgctgcacacacattcactccctattattaattcggcaacatttaatctaaattaaatttttgtctgtagtggtcgctgggagatataaatgttgtaagaaacaaatttttgcgacgttcgcaggatctcacccgttcatatatttcttttatgttggaaaatcacattataatttggagttgaaagatcacaatatttatctgtttttgggtgaacacgggtagtttcatacatgggccgtctgctaatatataatggtcaatattgggctacaatgggcctatattttccgatttcagattttgaaatcattcgaatcgtatactctcatttttgtttttcgttagattcctattccgtgaatctagctgataaattcttaattcattttgtctgaatgtatatcacaaccgttcttatatctagtagaccttcgtttgtttcaatcagcgtcttcaactactgcaatttcctcagaagatcgaacgttaggccacgatcggtcctcatgttccactacctcacatacacatgctacacccaaagaattttcgatgtggaaccaattatcatagctagacaaaaccctggatttatatccctagagatctcgtgtgatagaaatcttgatttggtacaaagaaaaacaataacatggttcaaaagtctttgtttaagtagcacgaaaccaatcaatgatttgggtaatgtaatacaaaatggacgaattgatcagttaacgagagttacggacaaagaataaagtcggcaagaaaaaaaatacaagtatgaaacacgttgtaacatcactgatgttcactggaagacaacacaaaacaaatatggtgaagacatggcaaaacaaagacaagtcttctcaaattcaataagacaagaacactcgtgggccactcacttcgagagacacatcacgaaaagtgataaattcacactggtttctttgaccaccaagaataaatttaagaaaaatccaaaaaatttaggaaaagttgggatactttgcgacgcgcctagacaagaacacggtgcacccatccttgggcgatatagtagggcagtacacgatctcatcacaaccgtctgatcgaagcctcttgaaatccaacaacgacgagaacattgcaatgaagagtacgaggtggttcaacgcgtaacgctggcctacgcattggtgaggcccccatccaaaagctaggaagttgcgtttgaacacctggtcctcttgtcttgtctcgctaaaccggtcaggatcaaaccggtccggttcagtaaacccttggaacgaggagtcgaaaaccgaaggaaagacaattgtaccttttgggatagtgtacgtttccgtgagagggaagtctatagcagcgacgtgtgggaccatagttgcaggaggcctgtatctaatgacctcacgcgccacggagcgtgtatacttcatctctgcgagctgatcaacggtgatcaaggcgttggactcaggtgaccagatcttggctacttcttctcttactctgttcagcacctctggctctgaatcaagaagcgtcacggcccagaggagtgatgacgtggacgcgtcttgagcggcaaagagaaaatcgaagagcaaaccaccgatctcttcgtctcccgagtgcggtggctgcggattctccgcgacgatcgcctgcatccagaaatcgattaggcatgctggttcttctcctgctgccatcctcgctttggattttcccgcgcaaatgccgagcgtctcccctagcctctttacagccctgcgagcctcgccgaacgcaaagccagggaggtctatggggagagccatggatccgagattgaacaaattataatcagtacggaacctgttcttggcttccttgtcaaggtagggtccaacaaaaaccgtctgcgaagtttctaggttgagttcacggacaagctgtcgcagtgacactggacgagatccgccggaggtactcccctcccactgccgtagatgacggagaataactaattgctggagggcagagtaagtggacagtgccttgggagtgaagttaggtgctagctgacggcgaacggatttgtgatcctcgccgaacatgtatataaggttgtggtcaccgaagagcttcttaccaaagggatgtccgataaggtggaaggcatcgggacgaacgtttgagaagatttgatgggaaagctcagtgtctctgatatagacgatgaattttccgatgaggtagttggcggagaggcctgagatgttcgccgtggaggattgcttgtcccagaaggaagtggggtcacgaacgagtgcaacggcgtttccgatgattggagggacgaagaaagggccagggatgtttcgtttcttgaaaaggtaagagagttgctcgacgagaaggaaaagaagaaatgctgagattaagtatggtgcaagagaggcaaatatagaaacagagaaaaccatgtttctttgtttctagcttgtcttaatggtttttgcgtatatatggaaatgatttgagtaacgagaagaagaagaagaagaaggttttgctttgtagtcttgcctgccttttgtctttcttggtgttctttgtttggtgggttttgcagaattttctaagaggtttagggaaattggattgaagcagtttgcaaattgcaatggtataccggaacaaaatgtctttctctgctctgtttcttttatatactttcttaatcatgtcttgtccatgtggagagagagagagagatgaatattttgaattgaccgtgatttgctgtagaagatccggttcatatagaaagttctaattagttggtaagttgtaattaatagcacattaagttttctatttctagccgttgtaagatcttctcttcttcctgcatatcaaaagaggaatcgtgtaacacaagtgaaaaatagattatatatttataaacgatagttttgtaattttgtgaataagttgacttgaccattctaatacatcactgtttcttagataaattttgaggttacttccatagatgactttggtttcaattcccaaatgaattgtttgtttctaatagtaagaccttaaggtgtagtttgggcgatggtctcaatcatacctatcaacctgatttgctcaaaaatcattatcaaataaaagttggaatcgtataataatacacattatttagtaataattatgtattttcttcttaataaatattatcttgtttagcttcaatcatgtccaaacacatacatatatagtgcgcgtgtccatcacaacattttatttttaaagcttatcggtgtataatgacgtttcaagttgcgtatagcgcaattaaactgattttgattcccatccaattatgtatgtcgtctctcaattgtgactgaaagacctctaactgttcttatgagcgaccaataaccgagattctgattaggacatgcagcttaaattgttgttattagttaatgttgttgttgttgtgacttcaccctaaccaggtagattgcatagtatgagaattc

SEQ ID NO: 328 - DNA, 93060 bp, Arabidopsis thaliana
aagctttgacacccaatccgaatgcctgccaaagaaatcacacaaacaatagcatgtttcaggtaaaacatacacaacaaactaaaagataaagaataaggaacagaaaataaagcacctcaaaaggaggaagtccaggtccatcaaaatctaaaactgaaatccccatgatcaatctaaacaaaggctcagcagtagcatacgcagccaacaaagccaggaaatagttatacaatcttgacctcaaacagaacctctccaccttgtgatcctttaaggcgagccatatacgatacaggcacagaaccaacagaaccagttgagagataccaagcacaaaagagtcagtagcacaaggcgtgtatgcaccaaatgcattagccacttgttttgtccaaacaccattaggcaccggcttacaataccattcaataaactcaaaccccatcgttatcctttcctttccctcaaacacagtgcatcacaagctaccacaccaattccctaccctgcaaagaaaatcaacaactttgaaatgagcttctaattccaaaaaaccatagcaacaaaaataataaattttcataactttaaaaagtcataaatcaatcattatgtgctcaagtgacaagaaatggacccagagtgcgaaagataataaatacattcgcgcgtaaaaaggggcaaaattgcatttaatcatatataaaagatagaacagtgacaagcaatcacaacgagaacatagaagaatcatcaagagtcaagactacaagattgagagagctcaagtgttttccatacgaaaaaaaaaaaactttgaaacgaatccataattttattatcacgaaaagactctgcatttaagatggtatcgagtcaaataacacaaatttgaaatccatgaaacaaaactatcaatcccactttacaggaaaaagctacaatggagaaaagggagaataacaaaacagagaaaacagagaaaaagggagaagctttacctggagattttggcaaaacacgaaaactcaaaagggatcttatgtactcatatgagaaagaaagtgggtgggttctctcactaatttgctcgaagattccccaaaaagagattgaagaataatatttgagagaaagagagagtgatacgtcaccccttacgatgcaaatatatggacgaaagagaagctttgttttttgccccaagaaaagacattaaaaaccatttaattataaacgatcatatttctttaaaacaattctatttatatttagaatcaaatatgttattgacagtatatggtacatttttcctattataacacttttctatatcgaataatataaaaaagctatataaatacaattatagtattctgttctaaaaccaaaaaatctattcatctagtaagtgtttctattatttataaaaaaaagacataaatgcttactttttaatacaaacaaattgatacatacaggttttttgcatacaaaaattggcttcataatagtgtaattttgatttttttttttaaaccaaaaatagtgaatgaatcttgtttcggtgttatttgtttggcaaaaaaattatgtttttgtagattcattgttgataaatattatcaatattattttcaactttgaaaaaatctaggaaacttcgatttgtgtactaaaaaagactaatataaaattaattaatctccactatagttcgttaattttccaaaacacctaaaactgattaatgaattctaaaaaggtttgtttccaatcaagcaattatgctgttcacgtgcgtgcaatgaaaattcaaaaatacaccaattgttttttttttatatcgtttgtctcttgatagttgatacagaagaggtttaaaagttagctagcgtatttcgtgtggttgatgatgttcgaaaaaagactgatctattttgtccatatagatttttccaagttctaagttcttacacgttaatctagtaagactctagatgtacaagagtttgattttgcatgcagtttaatttatattattgatttttttttaacaatatagctataaaagctataaaagctccaaatctgttctctcctctcgtctgtcgtcatctcccccgggggttggcaatctccgtttgtgggcatgtggtgggtgagcatccaggggtgttttagtctttatcaaataacaaaattaagctaattgttaaaccaaaaaaaaatattaagctataaaaaaataattaacttcaactcaacattttttaactaaaagaatgtacataatgcatggtaacatgctaaaaaaaacatatcacaaattagattaactccatcccaaatttaccacgaaaacctttagtttagctcacctctagtcttttagttctatttccaatttttgtttgttgtttgccttcaccatctccacaccaatgtcattgtctttttaattaaattggatctgaacatttcaaacattaaactttaaaaacaaatccaatcggatttttgaatccaggataatatatagtgcctcattgctagttgcaactcaatttcaatttatattctatggcacggtaggggacatattgaccatcagaagaataaagtaactagagtgcccttttcacatacagccaccgttcctctatatgcttttccatccacatacagatgtgaagatatcttgggttcggaaccaaccacatcattgtgaacttctccacaacaaaaagaaaatgagatttatctatgcgaaaagttgacaaactattgacatattcatgtctaactagtactttttcttgatagatacattttaatatcaaatgctttatatttttgtttattatttcattctttgtttccattgacactgtctacccttgttttgaccatctcagagctggtaaaaataatccagcggttaattttaaaactacgagctaattggtcttgttttatatttttctctattcaaatgcatttgattgttaaacttaaagagtcacaaacggtggcttcatctgactgcattcttgactgtttggccggccctaacgtagtagtcaacatataatagaacattttaaactgaaaaatggtataacaacagttaaaccaagtcaagatttaattcaccgtataaaccattaaccatggtaatcatgtcatgatttgaatcattttgtagacatttaaggccgagcacaaatgcacaacatagagagattacatagcaccaatgttgtttagaccgagcacaactccgacgtcggtcgatcggtcgatgatgtgcccgacctccgacggtgccacatgctaaggtgtctgcgagagtgaacccgtacggccgttacggatattgaagtcccgattccctcgtctcgagtcttattacagctgtcgtcttttattggctgatagcgctaaactgaatcttcccgcgaacaggatcaggttctttggttacttgttgtgacatgtcaagggacagaagataaggcccaataatcccttttgggcctttttcttactttcagaagaaaagcctgcaaagcttttgtgaaagatgctaacgggagacctctccaaaagtaggttaattaaccttaaccatatgttttgctctagcattaagataaaagcttaattaaacacaatgttttcaacaaaaatatttaatacttaatgccttacacaaagatgcttacgtttgtcttctgaatcaaatctccttcagattatagtttacaattacaaatatgattttattacatcgtgtcccagattgattatgtttttgactgcgtatatatatactgctgacataatatatagtttaagttttttttctttttcttagtaatttatatgaaacgtaacgagtaaatggcccggcagaatctattggtttcatgtcaacaaacaatttataatgtgaataagagatgttaaattattggaggagacatgggaacaatgtcaacagttttgggaagtaataatatatttaaattcccttaacaaaaaaaatatatatatatatttaaattattaactaatctgctaaattatttttcttaaatcacaagcatattgtagaattccaagggaaagagttggattctcaatgattttccaattttaggtgcctttggctacaagtctacaacgattaaatatactctagttccgggtctaattatttattttatattataacgagtttttttctcaatttttaaatctctaatgtatacttctagtatatttaatttaattagtgctgtctaaaaattgcgttagttattgttgtacttgcgtattccatttgaaagatttaaatatacgttgtgttgccatgatatagatctaaggatttatttggccatgtaattaagaataatttcataacaattcgttctgatttctaaacacaatttgtccgtttgtcggcttaccaaggcagcgggtatattggcggccggttttccctcttgattagtttattagttaattgattattaaaatcgtacgaattaagtaactatagtttagtttagttaaacctattaaaagaccaacaacaacagagaacagtaccagcaaggcagcaagagaagtagcttccgagccttatacgtaacttccctacggtacatatatttatgtctttcttttatttgttttaatatcatgaccttctaggaaactagtttaattagtgggtgtctctatatctttccggaattatttaaacgtgattagctcgactaacgactattaaggtggaaaagtaatctactctaacgtctatccactttttcatgcaataatttctgtccaaatttttgacgctaatggttactataaaagctaaaagagactcatgaaacgacaaaaaaaaatacataaatatatatgttgtgtatatatataaatatatatattagattagtttttcctatcttcccattcaaaattttaaaaagttagatatacattaaaagtttatgatcaacgcaattaacaagtatgtcgaagtaattcaatgaaaagcttatttataatgcatggttttacagctatttgcgtgcaagtaaacttgaaaaacaaggaattttacatatactgtgaagtgttaaactgaggacgtggtatggccacacaaagaacaaaggtataattggtgggataccaaaatttacatttagatagatatgaaaagaaaaatcaaaataactattagttgactttaaaaaattgaaatcgccaagtatgttttttttttttggtatgttttaatgtttaactgaatcaaatgtatgtttaactgagtttatacataccaaacaaaatatgacaataaggctacggcattactttagtttactaacagtttttttttttgggtaattaaatcgaccaaatctcaaattagtcataactcacaaccctatagaacggtagaaattttgtgtttcttccgtttagaaggggaaataaaagtcagtggtgatggatgcatgtagatgatgagattctatcctaaaccgaagactagctatatccacaaaacaaaactttaaattactaattaagcggataaacggaatgaattgacctataatatatattgattaacagtttggcatattgcagattgtattgactgcgtagtactatcaccttattgctgctgttaactaaaaacaaaaacagttttagcatttgacggagaaaaggtagaatatatatatatatatataaggttgttggtcgaccataatttttatgatcaaatctactgtttaagtgtatactacaggttgctacatatataatatcacaaacaaacaaaaatgattcagttttaaccataattacaaaagcttgatagaatatattaaatgtaaaatctacatgatgcgccaaagattcaatgagaacattgagaagcacatcgcataatttatggaaaatgcttacttattcatacttgcatgaatcttgaaagatcacctagagacagcatattaaaggattaaaaccgttatagggtttaccactatgttcttttaacatggttgaaagatttccatgttgtcacttgtcaataatagggttgtttttttttttttttttttttttttatcgtctgaaagtttattatagagattccggtgaaatacaagggtgaaatacaaagccggcggttaacaagtaaccccagaaaactaagccgacgattaaaaggataatctcggaagcaaagcccaaaggaaagggaaataacaaggcaaaacaaaccttacaaacagagcaaagttgcgaaactaaaacaaagaagcagaccaaaacaaccaaaattttaaacacaacatctcgtcaaccacattaccagacaaaggaaaggcagagctttacaacaagccactccgtaggggacaaggaacttccaaccaaatggacagcggtgccacctattacgatgaagactaccttacatagaagagttccaaggaatccataccggcgagaagaactaggccaaagacgacaagtcacacctacactcccggaagcggcgaatcaaagaatatgattgtttagcgcctcgaagaaaaccagccaatgaacagatgagatctcgatcagatctttagagtaaagacaaggagagaaccaaatcaatccggaccacaccgaaaaacaaaaacgggaggagatcgaaccggacagaaacgaaagcaaccaccaagcctggtaaaaggctaaacgagaataaggttaaaacatgaccggatcaagaggcgctactagcaacagagaccaacccacaaaaacaacataagccatctaagaaccattcaaaaatccctacaccacaacgcacataaactaagcaaaagcaacataaactttacagcagagcaagagaggcatagctccggcgctatggaagccaccagagccagccaacgcaaactgagatctagatctacttttagagagaagggagaggttttaaagagagaagtacccaaaaaaactagtttagaatgttttttttcttttttctaagtagatagttttatttttttgaaatagattccaatatcatttggtctgaatttcgtgtagaccaaatccagggtgcctaaaattagtagtatatgccatgcatgtggtccacacgatctcacatgttgggatttacctttacttaactttactaattttattagtgattaaagtttttatacatcttgttttcaacataaaaatcaaaaccaaatctcaaagagatctcattttggcaagaaaaaaggataggcacatacatatacaataagcatgtcttttgatttacacacactattcgttggagttaatttgtgagatgaatatttctaattataatcggcagaataatcatccgtttgaataaattaggagattaactattaggagtataaacaaccatgatttctttatcataattactttgatataaaacgatatttaccaatcaaatttatagaaacaattaacttatcattaaagttcttggttaatagtgtatatatatatacatatatatattgtatttgaagcccttgtaaaaagagaaacgtgaagactaaacaaaagagagtcactgtcttaattaattattagatcattatcatggtatttgaaaccctactcgtctaactcttgccaaagtccagaaatatgacaatggtcacacatgccatgtgaccatttttagccgatgatgtggaccttctttatattaagaaattatttggttagtttcccaattgatatcaaacaagtttcgtgatatgggtcgagacttttaaacaaaaacaaaacagaaaagtttcatgatatggatcactttttataaagaaaagtctacctatattttcttctattctgcactacaaaatgggtagacatatatacatatgtagtgtatgtatttatctattattctattaatcattctcattctcaaaggtttgacatgcccacaggccacaaccacaagcaatctcacttgccatgttttttttttcattttttgtttatatgagtatagtagataacacttaagtgtgtatgcatgtgtatatattacttatgttattttacgatatacatgaacacatctatacgtgtttgtgtatatgacatatctaatcaagcgtctatgcatgtaactatttaagtatgcagatattatgaaaatacatacgtttaataaatatgtattttcgtttctgcatgcatattcatatattcatgagaaacgtatttaactatttattaaggccttgaatgttttgtagattttgtaagagtttttggattttgtttttcaaatacttattttcgtaccaatcaagattttaaaattttgatttccatacaatttagaaaaactattttgttgtagtttttcattcatgattttagttttttagttttcctaaaatttagggaatctagtttttactccatcaacgttatttttctcaaaaactaaaaaccaatttttttgagttttaaaaacaaaaatatattaacaaaaatctaaaactaaaatctaaaatctagaaactaaaatctaaatccaaaaactaaatcgaaaatcagcatccattcaaagcctaaaagtgtagcgagatggagtagttcttataaaaagaaaatcttatataaaatattaataattgttacactttctgctgcacctttttatgtggcacccaactctctttaactaattcgtggggccttgcttctagccttattgtatattccaatttcaattgcttccacacaaattgtatttccaatagatatgttgtgaaaatctaactaagcgtattttccttcttttagcatcaattttggctattgtaaaaaaaaacatcaattttggctaaagaagaaatgctcatcaaaagttcgatcagttggacgtatcttataaaaagtcaaatgttgtaaaacaagttttttttggtgtaaatgttaagagttctaaaacaggttgaccgaaccaattctagcaataataataacccctaaccatgaaagactcatgaaggattcattcacaaaacaaatcctaaccataacaacagctaatgttgaaaacaaatatcaattcatctttgatgagtggagtggagccacgtaaatcttactgcatgattcagccaacttctagagtaaaattatatggaagacatcaaattggatcatatagcatcacatggaaacaagcattagaacatagccaggccgacttaaaacagagatttcttataattggtgtcgtttatataaaaaaaaaaatcaatgaacatttacattttcatggagttatttgcatttgtctttgaagtataaaccaaacaaaattcattaattagttttccaatttatgtttggacccaaaagctgtcgcgtcagaaaaaaggacccacagttcctaaatgttgccgcctgtcctcctcacatcctatgcttttatttattacactgttttagttaatctcttcatatctttcttactctctatatgattcattgattctatctttaatattctgtttttttaatcacaagttaaggtttttgtgaccaatacacatcatcctctgtctaatcgttacgattataaaactaaaacggattgaatcatcatttagcttattgttaaaaaaaagattcgagggagaaataataattggagtaaggtgggaactagtccgtacaaaacatggaccccacgaaatatatagtacgtacaagacacagaagtaagtcattccgatgtagttttagtaattggtacaagattgggatatagttaaactagttaccaaacacttggctaagagagagtttgagaagatacagaagtaacgggaacagttattgtctttaggaaccaacgaggaagggaatatctctctgggtttatttaaccataagtccagaggtcagttctgttttgtctctttgccaatttagctggcacaattacgactttgtccctcttccaccaaacatctcatgcatttttctccttatttccttcttttttctccaaacttctttctcttaagtttccaaaatacttaagagaataactgaatatagtcacagtcaaatatgttaatgtttgattcagattctttaatttaaaactaaacctagggacacttatcttaacctagggacacattaattttgaaaaacgtgttctaaggttagctaaggagagggccatgcagatatatatgcgccaaatgaatcataagcggtgggcatatttatgtctgtcctttttatggcttatgaaacaaagttaaagctatatattgtgcatgaaacttaggctacgtttcccctctattttccattcattttgaactcaacatttgcaagtgttaaccacacttcttctaactgttgtgattcgtttattctagccatttcacagattgaggctagtataagtattctagagtacattatatgaatacgtctcaaacttttactgtataaacaaaacagttttccaaccgcgaacagaggttggattagagcaactcatggaaaagataaatcggagatgaaaaaagttgtcacagtggtcaatccacaatgatatgagagtaggacaagtaggttcattcccgtataattatataatacaatatgttatagtagcccaaacattataggaggtggagctaaaacaaaacaaaaattagcgagaggagatctccaattgacaataattgaatcaaccaaaacctaacctaacataaaaacaatatcttggattcaaatccaaagcttggaacgtaacgtaacatgaagccacagaaagccaacaacatcctagtatataggttgggtcccttccagcatttgtatcatctttattaatgatcattaggtatgttcatagtcggtataaatatatagggtccgcacaaactggtacacttttttaatggcaaacatagtggtacgaattgatagtaattaagtgtgttttggtcaatagctagtttttttggggttttcaaagattatatatccgtgaccatgagttctctagttcaactctcactcacgagaaagacaaatgaaagaacatactgtactagtttttgtctaaaagtactctttgattaacctttagaaaattgatgttatcattaaacaaaaaaaatagtttcactatctcttcctataaccttttttacgggctcattgaataattacatatcttttagtacattttgtaccaagacgatataacattaccaatcatcttgaattagccagaaacaacaaactaaaactgtttaagtttcagaaactaatccatatataatgttgagattagttagtattcataacctatggagtattaatcttcaaaattttcctcatgaaatctgtatttagtcatcacttttttaacacagatgaatcactagtccaatatttctccaaaaaaagacacaagagtctcgaaattgtaatccatatctgtaattttgcacccctataatatgcctagaggaaataagaagaaaaaataatggggaaaaagagaagctactgctacactttcaggcacgtgacaacgtctcacacgtgtcatatatcttacgtcatcaagtcctctttttctctctttcacttttctgtttacctctctcacgcgttgaaaagtgcaatcaatcttacataattaaccacagtaagaaaaaaaaaaaatggtctctgtaacgtctttttactgttataaccttacacgcataaatacccctcaccaactctctctgtctcgcctctctctaaaactccaacacttctccttcttccatctctctcaaacttctgaaaatcttcttcttcttctcaatcataaaccctaaatcttcatctcttcagatcagaaactaatgtccattcaaagacaccctgtcctgtttcatctctgtcattagtcttctgttttcagattccaattttttttcttgaattatcctcttagccatttcttgatttaacttcgattttcccggcgatgttacgagaatcagacggtgagatgagtttaggaacaacaaactcaccgataagcagcggaacagagagttgcagcagtttcagccggttatcattcgacgcgccgccgtcaactatccccgaagaagaaagcttcctttctctcaaacctcaccgatcctcagatttcgcttacgcagagatccgaagacgaaaaaaacaaggcctaaccttccgagattttcgcctcatgcgtcgtatcggcgccggcgacatcggaacagtttacttatgccgtctagccggagacgaagaagagagccggagctcgtattttgcgatgaaagttgtggataaagaagctcttgcgttgaagaagaagatgcatagagcagagatggagaaaacgattttgaaaatgcttgaccatccatttttgccgactctttacgctgagtttgaagcctcacatttctcttgcatcgttatggaatattgctccggtggtgatttacactctctccgtcatagacaacctcaccggcgattctccctctcttccgccaggtaaaaaatatcaaattttattgaataatttaatattatggacaaagtcagattttttttcaaaaaaaaaaaattgtgaaaaaagattcatcatcatcaatgtatatatatattttatagttacatgcattgactctgttcacatttgttatcttgttctgcaagaacagacctgttcttatcatgtcggtcttttccagttctttgaattgttatcaaagagtctttttcagcccatcacaatttataaacgtcaataattatgattttattagctaatgagtatttattttgtttttggttacagattttatgccgccgaagttctagtggcgttagaatatctacacatgttgggtatcatctacagagatctgaagcctgaaaatatcttagttagatccgacggtcacattatgctctctgactttgacctctctctatgctccgactcaatcgcagccgttgaatcttcctcgtcttcgccggagaatcaacaactccgttcaccgcgacgattcactcgtctcgctagacttttccaacgagtcttgcggtctaaaaaggttcagactttagaaccaacccgtctctttgttgctgaaccggttactgcccggtccggttcgttcgttggtacgcatgaatacgtggcaccagaagttgcttcaggtggatcacatggtaatgccgttgactggtgggcctttggagtgtttctctacgagatgatatatggcaagactccgttcgttgcgccgactaatgacgtcattctccgtaacattgtgaaaagacagttgagtttcccgactgattcgccggcgactatgtttgagcttcatgcgcggaatttgatttccgggttgcttaacaaagatccgactaaaagacttgggtcacggcgaggtgcggcggaggttaaagtgcatccttttttcaaaggtctaaactttgcgctcattcgtacgcttactccgccggagattccttcttccgtcgtcaagaagccgatgaaatcggcgacgtttagtggtagaagtagtaacaaaccagcggcgttcgattacttttgaacgttttctacggtcgagattagggccacgtgttagtctgttttagctgtacatattccctcgaagctgtcctttttttcgttctttaatttttaaaatttcgttaatctgacttataaattaaaaatttaggtgacttttcatacaatttgtacaacaaacggattaatctaaaactaatctattttataattatcattatcaactcttcggaacttgggaacatctatttaccagtctaacgatagttaatgttaaggcattatatagttgaccaaatttggtcaaacatttcttaccggtttgaatgaactacttttcaccgcaatggaaaagaaaacgaattactttataataaaactcgtcacgcctagactttgtagttcgacgggtatagaaaaagaaaagaagattcgtcttttgacaattgtaacacatgaagtcatatttgctctttgttaaatctctacgagtctttagaatgtcaaaaaagggagaaaaaaacgttatccataagggtaggaatctgcctttttggatccgaccagttgcatgatctctcttctgctttcgattcgttctcttcaatttcaacttaaggagaacaataaactatagacggcaagacgaaattgttttcttgatatagagtatcaaacgcattcctctagtgaattcgtttaagctttatataaagtggtgtcattttctttaatgtgttaaatcgatttcattaattagatacattcacttgaccacattttggcccccgaaaaaaaaaaaagaacacatcataggttttaaatgtcattttcagattataaaattactttgaaaaacttatacataaaatatggctactaaacaaatatttacatgtttagtgggttataacattatcacaagactttaatactacaatttatcttggtatcaaaacatactccactttttatgcaataagaatttaagagctatgtttgtaaggaccaaagatatccacatcgaattgttagttcgtgtatttaagaagggaacaaatgtagatgtaatgaatcggataatgcattttaaagtgaagttaagcaagtaggtaaataattcagctaaaatttttgggcatgtttgaagcatgtccccaagttcatccattgcataatgtgacaatctagaaactaacaaaaagcctttggcctttggattgcgtaaagaggatttgtctgcaatatttatttaagaagggaagcaaaaatttaaaggacagagagatttagcgctagatgttttgtctatcttaagagtaacaaaaaacaatacatatgtacttacttacttgctcacattatattcaccacgtcgaccgttaatgaagtgagtacgttgttcaaccaaccaaccaacattgcttgatttaccgaccgcttttattaattgttatacatatgtgtgtataatatacttatgtgccataggcgattgtattagtgactaaggagtataaacaaatgtgtatacatgtacaggatgtgataattatgagtataaatatacataaaaacaatctctttagctagcctataaagtttttttttttttttttgtgtgtgcaaagactatagagattttctatgaattttagaaatctagagaacaacttggaaaggtaaggagaataaaagagattagcagtagaagtcacagaaatggaatggttattcaataattagagaccctataagcacaccaccgttaaaatggtgacaaaataaatcgctagtgaaaaagaggggagaaacagaaaaaaactaaagctgaaatgtcaatgattagacaattcaatacaaattgttttggacaatgcatagaagttttgtctctcctaaaatgtgtaaacatggaccacacacaagattaccgtcacgtcttgtgttgttaattataattaattttactaatgagcttaaaaataagtagataatgatgattttactgtttacactttgaaaaagaaaataaacatttaagtcgaaagtcaaagtcttcttattgggagaggtgtttctttcgcagaaaccgaggtttgtaacttgtcattattcctttctcactcgcttacgtggacccaagaaacttcccttgcaattaataaatactactcttttcaaaatacaataattggataactgaattatgttttctcttttccttaattgatttatatattgaaccactttcacattataaatttcgacataatttcaaaaaatatccattaattcacaacgcaatagttaacgttatttatgtattttttggccaagatgctaaacgttgtacaaagtagacaaattatcaaaagtccaagagaaccgtttatagtttatgtaattattttgggaattcttttatttcatggaaagctgaggagcaaaacgaagtgactcgaaccaacattgatatagacgcatacgtatggctaatgttacttgtaacttgatataactgcaatcgtttctactttttcacaagattaaagattcacatcaccgagtttttctgcgataacatgccacacatacaaattttgtttctcatacacttactaaacacaaatatcaattgtcactcacagcgtacgtgatgatatgaagaagagttttctcaaggtagctatttatgtttgtaatgtcaactaacatgatgctattatgaccgaagctcttcctcaagatattttcattctctattcagtcgaatttcgtcagtttcatcaccctcaagacatttcgattgaatagcttgtaatgacgtgttataagcaagagtacacatagttgctcgaggttggtagagcaacttagaacattgttagctacacttgttcagtgactagcacggaattgtatatagaaaactgcccacacgttactaaattaatgaaaaatatcctttcacacaaatgcttgttgatatctatctctggtctagctttaaacttgatatttgtctcattaccacacaaaaacaagggaacatagtaggtgatcgggtatatctatatatatgtacattaaataacaattttttgtatcatcggaccaagcttgtgacggtgaacaattgaaatgaatggagtatagaataattgtgattaataattgaaaacacataaaataacatgatttgttagatcttgattaatactataatagaaagaagagaagtgtgacaacacatgggatgtacccaacaacacaagggacagcttcaccagtctgatttatgccactgtcccgttcttgtcctccctctgccccaccactcctttgttttatttcatcagtaataatactactaattttagttagtgtttagattaatcataatgcaataaacaaagaaaaatatctgatttttggtagaaaaacataccagcagctcatatactattagttcatatttttaaccgatagttgattgttaaaaagaatgttgattcaagaattttgtaagaattgcaacattgttgaacaacagtggcaaaacataccataaactaatagatactagtaactatgatcactgatcaaataatgtataaatcggagattattctatgtaacatttaacaaaagtgtattacaagtaaataaagaataaactttttaagttacgaatggtaaaaaactaaagaaatttgttagttctctgtttgtatgcatgcattgtctctctgctaaaatgttcatgacaagtccacatctactcaaatactcatcgaggtgattatcctcgtcgtcgcttttatacacatgtaatattacacacatctatacatggagtatatttttagcgaacggataggtgccatgtggaggtaagtacacgtcgccacttgtgagattctgttccaattacttgtggaagtgaattatgtcgcagaaaaagtttgacgagatttccaattagccactcatttattaacggtcaccaaaagcatcaaattacagttttttttagtgctttgagattcttttccctgacatattgttttatgtaaaatagcaaactcgaaaagatagtaatagtatccaaattattattattacagtattatttttgataaaaggttgttattctttttttatttttttatttattgtatctattatataattcgaaactgctatattgtttgtctttagtttgcatctctagctttatatatgcttatgaagtttcaaatgttgctattatatgctgctgattctttttttcttatgtaggagtataggtttgaccgtttgacaatacgagaggaagaggaagttgggaaaaaacgacgccgcatggatagtctcgctcgttgcacgaatagttcaaaaggtgacgttaggcgcgtgcgggtcagcgaaacttgtgcctagtcagacctttgtggtatagtcttacgtggtctacgtctgccaaatttcagaaaaccaaaaaaacaattatatgtttggtccctagaaataaatattatcgtcgtttagcaagtttgaagtaagcaatagtagtattaatgtataaaaagtgtaggatattaggttaaaataggcctgtgatagataccgtaatgtctatgatgtgtctggtcagacccatttaatattggttcagaccatattagcacattagccaattgccattcacgttgggtccaaaccttcttccttctatagtgtcttagacaagtacgtacacacgctgaagtacaaatcatatacaagtatttattcacttaaaggtacaatgattgatgttttttgtgtaacatgttcctctagtccactatattaatccattacggagagaactatctaaaaattgtataatcgcaattgtaaattgcaaatctattaacaaaactaagatgtgttcacatgcatacttcgataaacattcttccatatatcttttgtgttaaggcatgttttaaatgatcaaatcacatattgattttatttgaaagtatatcaatataataaactgtttagaagatgttttgccaaaaaagaaaaagatgttttgttcttcttggaagtgtttgttaaagcccaagagagacttcaagctcacaatttctcaaagatccattaatactgggccttagttagatataccaagcccatatactttctcttcacaaattcccgttctaataccggcgcgtcgtgaaatctagagattttgccgtcaccagaatatgttaataaacgcaggaggagataaatggataaacccaaaaactgacaagtgaaaaccttttgaagccaaaacccccttcaaaatcaagctccatgatagaaaaccctcttcctacataatctcctggtaaaacaaaaaggttagtctttttctcctcaacttcgagtgtgaagcgtttgtaaaaatgcccaaaaaaatcgtaccttgttatggacaatttgttgtatcaggttcttcttatctgggttttatgttttgtactagtttgaaactgattctgagcataattgaatcggttgtttttgtaaatgatacagtgagaagtagaaagagtgtaaatggcgtcaatatcaaccaccacctggctctaccgaggtcaagtatgcacagacagtggaaagtccagtaattgtattgtgcaggttggttcttacacatcaagtttcttgttctgatccaaacttatctaatttagagatagtgaacattttagcttgtttcaagatgtcaaactggtaaaagtttgtttatgtatgtagagacgggttaaatgtgggtttccactcaagacattgcatgctgggattacttctagggatcggtctttgcgacattgtatcaaatgcaagaaagaggatggagatggtgatgtaagtgaagggtctaagaagagtgaagaaggatttgagtatgtgactgttgagaggcatccttaccatagttatatggattcaacttctgggaagcttgagccagcgtccggggctcgggctagtattccaggtgaggattattggcctgaaggaacttcgagccgggttagagctgctagagctcctcaaccagctggtgagtcttcgagttttccttcctatggaaagaatcctggaagtaggagaaagaagaataggaaagctactgaggagaatgtgactgttgaaacgaatgacgaagtatccgattctgaggatagctctgaagaagaggaaaatgattcctcggatgggtttgttacctataagaatgaatttgagagagaagaagaggagactggttttgaattagacaaaaagcttggaaggccacatcctttcattgatcctacgaaaaagaaacaaattgaaaagacactcacgagcgatgaatcgtggtggaactggaggaaaccggagaaagaacaatggtcaagatggcaaagaagacgtcctgatgttgaaacggttagtcatcacaatgatttcaggtttaaacatgtgtgtgtttccccaatgtttgatccattatggtatttttttttgttgttgatgcaggttttcctcaaggcaatggcagaaacaggacaagtgaagctctatggggaagaaccaacactcacagaaacttctctttatagagcaagaaggcatcttttcaaggaagagaggtatattgatctaacgaactttcaagtgaaaatctgttttattaggattttctttcgagttttctttctctcaggctgcaagctgagcgagagagattagcgaaagaaggtccaatggctttttattctgaatgggttaaagcatggaagagagacacgtcaagagaagctgtacaaaaacattttgaagagacaggtgaagatgaaaacacacaactgattgagatgttctctcatcaaacagatagagaataccggataatgatgggaactgatattaggatcaagagagatccattggcaatgcggatgagggaggatcaaattaagcaaagtaagaaactttgaccgttgaagtttgaactaactcatcatggatattcaatcgttcgactaacattctcggtttcttgcagtttggggcggggatccagtttacccgacaattaactacattcaagatcctaatgcggttatggatttcagaggacctgattttcatgagcctacaccaaatatgctctcttatctaaaggaggttagtctgctttgctcaaagttctattctttttctttcttggtctgattgttttctttgtttctgatttgatcagaatggcaaagtcatctcaagagagatgcatgaagcactactgacaaaagagaaaaccgagcagctcgaggtaaagtgaccaatctttcatttcctttgacacaactctgattgtgagatttcagggtttcgcttgatatgttcgataaattgtatgaatgcaggtacctgacatggatgatgcaatggcacaagctgttgatattggtgaaaacgatgtgagtatcatcgattacatcagatcctcttcttctttattgtttcttgatgtatcatgctctgaaacatctccggacattttttgacaggacgacgaagacgatgcagatgtagaaaaagacgacgagaaagtgccgaggaactggagtgtcttgaaggaaacccctgagcttcgcaccgccaaggtaaagtcacattcaacttgagccacattatatgtcttgtgtggtgtgttgatgttatgagcttggtttcttaaacagcctaaaccaaagaaggaaggtcggatgtctctagacgaggccgtggatgatgctgagaacttaactgattttctcatggactttgaagaggagactgatccttaaacctggttttcgtatttcttatgtaaagacgttatttagggcaactttttcttcactggttttgcttgtatacttggaagggatgatatcatttaggagtggatttgagttttgcaagtgatttgtatcatatggaattcaaatatttttgattgaatttatagagttttgaaagtgatttgttaactgtactgcatcctgtttagttcagcttgagacggtttaatctgttaaaacaagacctaaaccgaattcgcaaggaatatgatttcacaattagtatctgtctcctttttttgtcatgtgtagtttaaaaccaaagccacagcttgtcaaacattattgtttcgtgaaacgaattggaccaacaaaatcctacaaatgaaatgaggaatgttttggtgtatagagagaaacattacttaatctcacttgtttctggtgatgactctatgggtcaagtcaataagtgcccgcctcgatcttttgacatcttcattgtctgtttcaggtagagacccgattgcagctgctgctagattcgcatgttccatggctaattctcttgccctctgtattcccttgctcttcccaagatactctaaagcctgtgtgatataatagtattagagactatgaaaacatattatagattttaggagatttgtttctttcaaacttacaatgtcaacattcctaggatctttttcaacttgatcaacaacttcgcgtagttgaggaaactcttccatggcaaagaggattggggctgttatgactccatggcgaatatctgacaacgatccctttccgagagaggcagatgtgcccgtgaaatcaagaatgtcgtctattaattggaatgctaaaccctgaaaaattagaagttcatcaaagtactgtaagaaaattagttgcaatggagccaaagttttcagaagaagacaacgaaccagattcctcccatactcaaaagctaacacggcaacttctgctgtttgtccagtgagaacggcaacagctttgcagctgttagagattagcgatgctgtcttataatatgtcttctgcatgtagtagtccatactgcaatcatgaaaaaaatcatatttgcattaccgatcactattatatgaattccagttcctatataagccgcgatcgggtttttgatgataaaatcgactcttgttttgattctcaaacatacattagtagcatagaagacttgagtagtcttgtttttatcgaccagaaaagaagattatacctataacgctgctcggttgaactagttatctccatggtttcaccggtaacaagatgttctacagcagttgcaagtaatgctacaacctacaaaaaaagagacacaatgaagatgtatggcttcgaagaagtgataattaattctgaagacagatgtcattgattctagattgtatatcacgggagattcaatatagcctgtcaaccacagtatcttataaaaagtaaagatttcttcgaaaagtttaaaataccagggtcacgtttattagtttcttttacctctgtgttctttaaagcagcgagagccccacaagcccgggagagcaagaagtctcctgctaataccgacatctacaacatgaagccaatggtgatcttcatatccaaattgcagcacaatcgccaaaaagcatatttaatcatgtcttagcttctactgtcaagtgagtaccttgttacccattacaacatttaaggaaccaacaccacgccttgtatcggcatcatccaagacatcatcgtgcagtagacttgcgacctacaatgacccgagcattactaattttaaaagggaggatactggatcttgatctttaatgaatgttatgagtaaaactatagttactcacgtgtatcatttcagtgatttcagcaataccccgttgccttacgcgtaattctgatgtgactatatctgttgattccccaatcaatgcttctggaactcgtacattcagagctgtcgccatcagcagcaaaatctacaaacatgataccagactggttatgataccaagagagaatgaaccagaacatgaaaacaagatatggtgacataaagagattatggtcattacagttgaacgaaactgttttccttgcacaccccttttgaagaagtactcagcagcagaggcaagctttggaacctaaacagcagaatatagaaaaaaaatagagattagcttcagaacatcagtagcaaatttgctttcaccacaccattgtgcacacaatgagtactaatgaatgaaaaaaggccactcacctcggcaagtaccatctctctcaacttattactaagaagtgacagctcatcggcaacaagcgaaaatgggtcaagctcctcctaggaaaggacaatcttactctttcagcagtcggaaaagaaaagaagttacagcaataaatcaaagttaaaaaaacaatgaccaactcaacaagttcagtgacaaaaagtgagaaaatttaaagttggggtttgacagttttttcttctacaactgaagcaatgtccaacaaaattgaagtatatgtgaaagtttaacaatagaggatgatagtgagctaagtacgaacctcaaccaaggagctactctggtgatagagttgatgactaaatccaccaaaaaccggagatttcaatgaataagttgttctgcaaacgtaaccctactaaaacatcacaaagaataacacattggttaggtcaccaattctttataacacataagattttaaaataaactgatctctcacaactcttttcttcttctctctctgacacacagataaaacagtttgatgcatccaaataggacccatgataatccatggcaaaatgtagaaagagaaacactagttttggctgattactccattattttccacaatgtcttacaaaattacatcacaaacaaaaagggaaaattttcaattccaaccaactccctaaataatagatgggcaaaataaaaacgacacctttattgaataaacacaatctccatggtaatgattagacaaaaaccgagataattagcacagatcataaatcttacatctgctagagagtaatttaaaaaaaaacaatttccccacaacactcaattatcagaaaaaccctaatcgaatattttctcgctacataggcacaagagaaaatgttaaaattaccttgtgtggagagtcagaacaagagtgaccctgatcgggaatgattgcgaaccgatgagaggcgagagattgagaggagccatagaagctacggtttctcagaaacttagaagaaatccgagcaacactcctcgtgaataacattttctaaatggatcgaaaacagaggaaagtaaaccaaagaggcaaagacttgttcgcttggcaattattgtgaatctgaatagaaagaagaagaagacgaacccaagtcgagaacgcagccgactcaggaatttacgaaatttattaaatgacgaagacgaacctcagccatgaaaatgtaagtaaatattcacagtttttactgttttacttgctaaggtagtcaatttacccaacgcctttttagggcttctcctgagtcctgaggtttaatgctatttttaattttatattaatttcgtaaaaccgcgaaatcataaaattcctagcaagaggcccactttaagcccaataatacacaccttagcccacgtttgaaagttgaaacaaacgaatatttcaccaaattgattttttattttttacacaagtacacaacaaagctatgaacacaatcaataacattcaccactatacaataaatgttacacgtttgccactgaagaggggtttgtgagcaactgctcgaactcttcatcagtgctcttaagcatcaatgacagtggcaactctaatcctctctccattgattctaagtgtcttggctttatccttttctctagactgaaggcaaaatactgtggaaactcctttagattctctagttttcctttgatctcactcatgaagtaatccagttttggtttgaagttgttctctatgctgaatgtgaataatgctggacatcttaggatcattccaatcgcttctggtcttgagaaccctatactctccaagaatctgaccaacaaaaagaaatgtccttagtaacaacactaaaggcagattctctaatctaatcactagtaacattgaagaaaacggctaaaattttacctaagctttgggatgagagtgtgttcaacactagacaccaacaagataggatcttggtaagcaagagcttcaagatccttgagaccaagtctctgcaagtagaagagagcaggtttgagctggtcttctacactgctaataaggagccttggacatttcttgatcactcttctgaacgcattctcagggacatggagatcattcgacaggaacatgaaaacagggtacagttctgttctgacgtcggaagtgaggatcttaggacacatccccaagattcttgggaggtcatttgggtagattccttttgattgaaggaaatggaggacggattggatggagtcaaggggggctgagcagagacatgggttgagagaaagggcttttcctgagtcaattcccattagctcgagacagaggatcttctctttcatctggagggttactgtctgatcagctacagtgaagagaggatggctatggagattggttttgatggtggttggtttcgtggataagaatgtggattgagattgttgtggacatgaaggtttctttggggaaatgtagagagacgagctcaatgctgcagacatggtggaaagagatgatgtggcctttggatggtctgccgaaggagaagaagaagaagtgtgaaggtaaggtggttgttttccacgtggcactattctcttttgtgattggtgagattagatagtgtttcccttttttgtagtttggataatccaaaacacacatccaaacacgtggcactcctcttgtgcaatgattggctcatttgaggttacaattcgtcatcagtgttctaatgtttgatcttctctagatagttgttcgtctgatgagtctcttcctcagaattgattttgctttgctcaagctaataacattctagaatcaaatcaaaagtggatgatacaagtttcaaaatcaacatataggaattgcagttagcgagctccaatggtgagcatctaaacacgcaagtcacgagaaaaaacagaatcataccatggaaggatccgagagaagagtgccgaaattgaggtgtacctatacggcaaatttagtcaacaacaacaacaaagactcatgtaactcattttaactgttctttgaacatatacgaggattcgatccaacgctttatctaatgtactagtgtgatctgtctgaaataccgagagattctgtaaagtaaatttgtttttgaatcagtttccatcgatttaaaaaagtcgcaacaatttttacttttaaatttttatttattttaacccttgaaattaaactaacgattaatatctccatgatctcattaccaactctaataaacaagatgcaagaatgacaaaagaaaaaaagggaaggaaacgacacaaaaaggttgactaaatttgccgtattggtacaacaacaaattacattaaactaaatttgtcgtttgatatctcgattgaaccgttggatgaaatcttcgactcgtctgttcaactcctcgttcgacatcttcgagaactcctccgactcttcttttacattctcccacttcttcgtcgcctcctccatctcctcgtcagccttcttccccttgtgaacaaccatccatttcgagctatccgattgactccgatcgtaacttttatgtctatgtttgatctcttgacgacgacgttccttggatatcactgacccacgagccttatccgatttgcttcgcccgtaggctttagagttcatcagattgcttgcgttgcaagtttcttcttttgcagctattatatgaacattttgctcagtcactggctcacacttttcaatggctttgtttctcggttggttcttgctcacggcttgtatgattctctcagtaactttcgctttcttgttaggcaaatactgatcttgtaagtctctcgctcccactggtccttcttgtttctcacggttcttggtttcttccgccatactcaccccatagaccgacttttccggtctagggttttcttgtgcatcccttctcatcgcggctgtgtattctccgtaaaaatcgaggttctctttgtcagtgaatgcaccgtaatcggcggcaatgatgatgataagtgcgttggagatgacgaacaagatcttcgtgtcgttgaagatcgacaaaggagacacgtcgagaacgtggaagatcaaaatgtaggtgaagatagataagatgatcgggagcaacgaagagtacaatttgtattgtttcttgggcttgtaaggctcgaagaggggggtttcgacaacgtacgagggcatttctgtcattttcagggatagctcctgataagttgggcattggatttgaaaaattgaaccttgaggacttgaggtctcgtgtgtatgatctttggattggtcatggttggagctatttatattgtgatcgtaagtttgaattattgagtgtgtgaatttcccattttacccttgtttcaactactatatcttacttgcggatcctgccacgattcggtatttgtcgtttcatgttgagttacgtggaaataccaatcgtcttctgcaagtattattcaatgattttctttttgtttacctggaaaatgtacattacatttaatgtttgtattaagataattacaaaattaaaattattgtcgatatcgggtgatataagcaaatcggaaaattattttaggtcaaggtacagaggcttagtaccgcataacgtcaacacgtaaccttgtgacaacaacaggaatccgtaaatttttatttttcttatatttatacattacattaggtacctttgatatgtacaatataagaaaaataatgtaccacgctttgacagcacaacaaagtaaaatcaaaacaacatatatatgatagatttgcttccacgtatctataaaaaagtgaagtttattttgttgcatcacctaatgattcaaattttacatatataaaaataaaatttgaagattcaatcaaaaggattgatcattgatgtgagtttatctgtttctttatccggagtgaaagtaaaactcgaatgggtttttattttaatctttcaaacctctattattacagtcatttttccatgaattgttgcagttctcgacaaatccgtcaaatttttgggtcgtcagcaaataaaattcattactaagccagacatttaattaatttttttctatcatcataagaagccaaaatatgtttatacatcatattgtaatcatagaaaatttggattgactatcagcttgttggttaagttttgtataacgtggcattagcgaaattcatatgagctcacacattggcggctggtctagaattcatcgtacaagtgttatgattatcttaatttggctaatttctcgactattcttgcatcatcgcgctttttttttccccataaatttatttgttattcaaagttagagattagtgtgtagagtgtatctttcattaaaaaaagatcgtgtatagtggtctaacatttaggctatttaccattttatgcaacctaattgaagaagataacaagcatgcaattgattttttatttttttcggacttctaatttaggcaatcaatttcttgcgagttagaaagttggaaaatttgaggtttttgacgacttttccatcaatatcttccacttttagccacaactttttttgtttttttgttaaatcagaaagattatgttttttttttaataaacgttttcatgtatcttagcaaattttgtgataaatatcttttaaaacttcaaatccatcacatatttttggtaagttttaaaattttcgtataaaagtttctcggtttacccattttaggagaccgttgataaattttgtcaacctcttgaactctaaacacaagttactggaaattatgaaactttaatactctacctaattaaggtctgtaatccatccaaacacacagaaaaagaattcaagacaattggattattatgttacagtaaaaaaaaaattgaagagaatcacaaaaatgaaatcaaatagatagtgctatcggtaacggtggtaaggggaagttgcttgaatccgaagacttcgtttctgaagaaaactgtgaagagatctcttcatagaggccttttgataatgaaatcgagtcgaattgtttgggattgttggaggatccgaaccgtctgaacttctcaaggataaagatttctcttccacatctctactcgctagcgatagtatagcgttagcctcaagatgggtaagatctgaagaaacacacatgtgcccgttgtagaaaatggttaatatctgagattcttgctttggttgtgaaatttcagagctgcttgattcgtccaaccttcaaaaaccattgataaaagtatatcagtatcgtttgactctaattcatatttataaatttactaaacaaataacgttgaaagagaaagaaggcttacgagctatggaaatcagaatcataagaagaagtaagaaggcgaagttccaagtcgcattttgtttgcatctccatctctttgaaattgagtaaaggcttgtcgcagtttttgatgatgatgatcatgattgtatgtgtcagtcagttgatttatatatgtgtgtgtgcgtgttgtgtatgtgttgggatcgaagatagagggaagataaggatagagaaaagacgagacaaaagctggcattagaacagagtttggacagaacacaacttgacatctctgtttctttctcttcacgcacgtgtaaaatgctttttgtgatttttgttttctttttcattgtaatacaaaaaataaaataacatttttaaagaattcatcctataattcttttggggttattagataaaatactggactcgtgcctcatcagataacatagatttatcataaacgataaacctgtttgtgaaattttcaaaaattggattccatttattttggtattattgccatcttaatacgtttcaagcgaactaaaaaaatgttaactactagattttaatccgcggtgtaccgcggagacaattcattttttaaaattaatatatataaaaatttataaattattttatagtttatcattgttactaagtaacgtcctgccaaacccgtccacaaaaaaaaactatttattttattaatgttgatcttatttataatatgtttatgaatcattgttaaaatattttagtcgttgcgggacgttgaacccacacatttttcgccaattggttaatatatgttcattcttaaaatttcgaatcacaaaatatgacgaatttgtttttgagatttttttaaactctatatattaaataatgatattaattatttttgatagattaaactttttataaattcaaatattaataatgttttatgaagtttaaatatacgaataatattatttaaaaaataatattttttaccttttagataatgatatattaactctaaaagcaaaaatttagaagatttaaatttttaaataaatattttcattcctaaataattaatgtcagtagcatgacattgtaaataagttgaaatacatgatttgtttatttaaacaaaaaacgtttagtaagaacaatatttatttaaacaaaaaattttgttttaaaatattgttaataaaatacgtttgtgctaattttaagggattgatgtgaagtttgtttgaattaaatttgattgataatgtgattgacaatttaaattaaaaatttaaagtaaaattaattattttggaacaaagatttaatgctaatgacattgaattgtaaataagtccaactctaggatttatttgttaaaatgactgtaaaaatgtatacatagatgggtagagtataaattttatgattaaaagttacattcaaatttcaaaaccatacttaattctaaaaaaacaacacttatagtttataagcagctcttatgataaaaatctttctgagttatagctctgttaaacttgtattcaccccaaaaacggatgtttcatttcttattttttacttggagtattttattgtaatttgtaaaaaaaaatgtaaagtgggggatatcatgaaaaacaacgtcactttgtttggtcacaatatacatttgataaaataatggtcgtcgcgtgatttagttgatttttgttttatcaaccacgtgtttcacttgatgagtagtttatatagttaacatgattcggccacttcagatttgggtttgcccacatatgacataccgacatagaaggttaaatccacgtgggaaatgccaatattcaatgtttggttttcaaaagagaatcatttctttatatgatctcaaaagtatggaattgaaatgactaatgagcacatgcaattggtgctatcttaaaaaccgaacgtctttgaatttaatttgtttttcaccaaaggtacctaatgaaaccctttcattaaaaaataaaggtaacaaacaaaattttgtattggaaaaaacattttttggaatatataatttggtaatagaattatgagcaaaaaagaaaaagaaaagaaagaataatgagcataataaagcctttacagtattactaattgggccgagcagttttgggctcttgatcatgtctagtaatcttaaacagacgataaagttaactgcaatttagttggttcaggtgagctaccaaatccaaaaatacgcagattaggttcaccgtaccggaacaaaccggatttatcaaaatccttaagttatacgaaatcacgcttttccttcgatttctccgctcttctccactcttcttctctgttctatcgcagacatttttgtttatatgcatacataataataatacactcttgtcaggatttttgattctctctttggttttctcggaaaaatgtctgcgatactccaaggagctggagctgcaacggctctctcgccgtttaattctatcgattccaacaaactcgttgctccttctcgctcttctctttcaggttcgatttcaaatttgtggaatgatctgtttcggcgattaaattgcttgatttggtaagatcttaggagtttttatggggtttttgatgtagtgaggagcaagagatacattgttgccggatctgatagtaaaagctttggttctagcctcgtagctcgtcgctctgagccgttgataccaaatgctgttacggtatttgtttaatcttagtttttgatatcgtattaagaatttacaatggatctttgatggggctttcgatttctgtagacgaaggcggacactgctgcgagctctacttcatcaaagcctgggtatgttctgcatcctttgttacttaacttcttatgctaatggtttcatgcatcgattttactaattttgaactcttgatcattatcatggctgttaattggaagaaaaagttctctctagtttggtagttaattgtgattggcattgctcatctatagtgcattagatctatgatactgcttctgcttgattgaatcttgtgttttattagtagtagttcatgtgaggttacgtataatttgtatctacatcctcaaagcctacaaattcaagcgtatgcattttcacttatgcatccattgttccaagtagcacatttcttgctcttatctctgtatgttctgtgagatataaaacctacttccatgtaaggtttatgccttttgccacagcataagcataactaaatttaacttgtgcagacatgagctattacttttcgaggctcttcaagaaggtctagaagaagagatggacagagatccacatgtatgtgtcatgggtgaagatgtaggccattacggaggctcatacaaagtaactaaaggcctagctgataagtttggcgatctcagggttctggacactccaatctgtgaaaacgccttcaccggtatgggcattggagccgccatgacaggactaagacccgtcatcgaaggtatgaacatggggtttctactcttagccttcaaccaaatctccaacaactgtggtatgcttcactatacatccggtggtcaattcactatcccggttgttatccgtgggcctggaggtgtgggccggcagctcggagccgagcattcccagcgtctcgagtcttacttccagtcaatccctgggatccagatggtggcttgctcaacaccttacaacgctaaaggattgatgaaagcggcgataagaagtgagaatcctgtgattctgtttgaacacgttctgctctataacctcaaggagagtattccggatgaagaatacatatgtaatctggaagaagcagaaatggtcagacccggtgaacacatcacgatactgacgtattcaaggatgaggtactaaatcacaaccaaaagctcttcttcattgaaattgaaacaacacagaactaatagagtacttgtatcaggtaccatgtaatgcaggctgcaaagacgctggtgaacaaagggtatgatccagaggttatcgacataaggtcgttgaagccgtttgatctctacacaattggaaactcggtgaagaagacacaccgggttttgattgtggaggaatgtatgagaacgggaggaatcggagccagtttgacggctgcaataaacgagaactttcatgattacttagatgctccggtgatgtgtttgtcttctcaggatgtcccaactccttacgccggtacattggaagaatggacggttgttcagccagctcagatcgtcactgccgtcgaacaactttgccagtaattgctttttttacggtgattgtgttttacccttttttactttttgttactgtttgtcttcgatggaaaatgcttgtgaaatgaaaactctgaattttactcttatgatatgaacatttatattttctatagataataacttccatattcacatacactactttttttcttcagaaaatgatcgtattacaacattgtacaaaaccaaaaaccttctggaacattattagttgataataacaaatcgtaatagcggtttcaccacttactcattttacatcagaagaacataaatcaataaaaatactaatcattaggtaacaaaattgtcataattcgtgccgacgaaaaaagaatatactcaaaagaacagtggggcataattgacattttctcaatctcctccataattgtggtgaagagtcaagcaaatgcgtgaatacagagtcggaggcatctgagaaagagagaaagagagatctcaatggcggcgataacaagcgcggtgatagcaatagccggaataatcttgggatggataacgatagagttagcttgtaagccttgcctggagtcgggccgtgaagccatcgacagatctctcaatcccgattacgatcctgatgaccaagacgtcgactcatcttccgatgttcgtgctcctctcatccctaatcatcctcccgataattccgatcctgatcccaccaccgcgatcaagtccgtctgatcgatcttgagttttgtttgttgatttgctatccttttgtaaaagtttgccaatttcagttgatttgtggttgatttgtggtcgttttattgaaagcttgtgtttttgttcttattgcaaagttataattaagaaacaagacgagatttagccatatgagtaaggttcttgtttttggggacgaattgtgtatctcttctttgatcagcacgaaatagcttccttcttgtttacacatcaaccatgccttcaaattttgcttatctatgactcaaacatacataatctactccgtatcaaatttaggtatttgaagttttaagtttcagatggttatttgttgtagtagtagccaagtaactttggacgctgagtttttgtttaatcgacaaagaactcaaaaactacaaatcagttcagtgacgaagaacttggaaactgtaaaatcgacttaatgggcttagtagtatttgactctaaatgttatgggccttaaataacggtgcctataatagttgagttgactctgcttattcagttattccaatctcccagagttgaaaattcaaattctctctctctagctatggcgctttcttcagctttcaaggagaggctcgatcaaatggagttcaccagaaaccaacgactcaatcttctccaggtatcgatcaatttagaatcctagcttctcttcgttccactgcatcatcgagtttcaatgtcgctagtatgtaaatgtgagaatcgctatatccatgtgctaatcgagatctctggtttgatgaactattgctctaattcaattcgaaatcaagagaattatctaaaaacagatcattatcatattctgcatcaatttatcgatcatcactataacagtatttttcaatttgaaatttctgaatccaaattgttgatcgttttctggttctgtttgattataatgtttgagtaggcggagaaagaactacaagtgaacaaagcacagattttagcatcgaagcacgcaactatacaatccattgaacgcagatgtttgatgctagaacagaaaatagcagcacaaaacctgaagatcacaattctcagatctaacatcgatgatctcgactccaaataccacagctatatacaacaattgaggttaaatcattcttgactcttggtttgatgatggttgtgatgtcataataatgtttttgattggtttctgttgaatggtattggagaataggacactgaagattgaggttgaggagctgaaagagttagatgaagagagggagaagtattacaaggtgaaatgttcagagatgaatgagtttatgcaaaatgttgagaggtttagatcagagaaccggttacaaatcgagaacctgcgaaaccgaatcaaggaggtaaaatcacagtcaagtgtgtggttttggattaagtagtgatttgtagcattgtatgctttagttatgtattatcaatctttgtgtttctcagcttaactcaacgttcgaggaaagtcatcagaagaacatttatctacagaacataaattaaggtatgattctgaattcctaatcatcatttgaagagagatgtaaaagtatattgagcacggttgtggcctgtgggaattacatagggaaggcttttatgagattactaaatgatattatctttataaaaaaagagattaaaatggatacagtattcaagacattttacatcactagccaattgcagcctttagatatattatgaaaaagaaattaactaaaataatagataaattacagaaagaaacaatgtaataatcattgtgagttgtgacaataaatatttgtaataaaaaaggatctcacaaaaaaaaaattgttaaaaaaggaaacacatatgtaagcaagatgccctatatattacggttttggaataaaatgttaaaaatagtttaatagatttgattcactaaatacacatgtacatatttgatggcatgatgatcaagaaagtaccgtaaaatgttaaacttccaatgttccttagtgaaaaaggtaaatatgtatttttcacaaatgttaaacttgtcatttgtgtgtttgacaggacgtgtatataagcataatctataccggagaagaagaagtcacgaaacaaagttaaaaagaagaaattttttggtgtagtgaattcgaagagcaatatgatgaatattggttacattttaaccatcgtgtttgttggtctcatcctcatctcggcttttgtggcgtgtttctattgcgccaaacgattactcaaatgttgtggcggagaggaagattcgcctgctactgctactgcgtctacgtctacctctacgtcttctgcgtctgcgtgatcaacttttagttatttgttttggtttgtttctttttctttcaatgattttagattagtaacctaaaggcatagcagatcgataatgagactcggcaaaatttttatctttataccgctgcttaataattaagttttcacttatttaatgatattgtacctctattcttgatctttcaatgattttgttaaacattaaaaatttgcaatgttattgttacatgttacttctatatatatagaaccaaaacgaaagcaatacaatactatgcaaatacatagtagagatagcaaaatcaacaaataaaaacatgtaagaagagacatgagctcatgaaaagaattcaagacagatgtaccaagcctgcctagagttcaagacatgtcatgatgacatgacaacaaatttgttagcttcttctttagatctagcgcaattgcagggtttgataggaacaaataactgattacttgttagattctggatctacataccaaataaaagaaataactcattggcaaactgtactttgaaaacatgttttccattttgtctccagcttacactcttctcacattagtctagtcaatgttaacttgtcattggagcactgtgggtgatcataaagagaaagaaaaagtgttcaaggtctgcaaagataaacatactttttttctagtttgtgtttggtgaacagcctttgtggtttttcctaaaggaatttcaaatgataaacagactacaatgcaagatgaagagtactggactcatgacaactaacaagttgtttgataaaaaaaaaaaaaacaagttgtttgattctctcgctaactgttcaagttggaggtcgagagcagaatcctattagcctccaacatttttgcaaaatattaatataattcagttgaaattgttaccttacaaacaattcaaaatttaggacaaaaatcgaaaacataggttagtaagtttgccaattatttgttttttgatgacgatggtaatatcaccaaaacgaaccaagcaaaccaataaaaaccgaaatttccaaattaataagttaatcggcggtttatctccaccgaacaagaaaaaaaactaaaaccctaattccagcgtcgtcttcgcgctctgagaaaaatcgcagagtagagactagaaggagaagaagatgagagtgaagaggcagaagaaaaacaggagaaccgtgagattcttcacggtctgttacggattccgtcaaccctacaaagtcctttgcgacggcactttcgtccaccatcttgtcactaatgagatcactcccgccgacactgctgtctctgaactcctcggaggtcccgtcaagctcttcaccaccaggtttatatctcttattgcatcttcacattcacgagctcatatcaatttaccaaatttcttattatgctttcgttggagctgttatgtagatgtgtgattgcggagttggagaaactgggtaaagattttgcggaatctctcgaagctgcccagacgcttaatacagcaacgtaagcttccctttttcttattatcttacttgaatgtgtgattgattagtagattgtggaaatttcgaatttgattcataaggtttggagttgagtttgtaattgtattacatctacgatgagcttaatgtacagaaaatgaggtttgtgtaactgatatgatgagcttaatgtgtagaaagtgagggtttttaagttccaagctggattttatatagtgtatatgatgaaattgatttgtgtaactgatataatgaggttaatgtgtagaaagtgaggtttttgttatgtgccagacatgaattttgtttgatgtttgtgtgattgatttgcttcgatttgagtttttagatgtgagcacgaggaggcaaaaacagcagacgagtgtttgtcagaggtaataggggtacaaaatactgagcatttcttccttggtactcaggacgcggagtttaggagaaagcttcagcaggttagtttgatgagcagagttcttttgtatcagagtatggatttactgtgtgggttttagagtttttaatacaaagaatctatgtgtgttgtttcctctttcaggagtctatagttcctcttgtgtttggtctaaggaacatactgctgattgatcaaccttctgatttccaacgtcagagtgccaaagactctgaaaataagcgcttaactatgaccgatacggaaaaaaagttgttggtgaaacggactgcgaaaatcatagcttctaatagaaaagaagcaacaattgcaaatgaagaatggggaatgcctcgagtagtttctacaaaaaatggacttggtgtgaaggatagacctcagttcaagcgaaatagagccaaggtaatgaacagctctctttacaacgttagtcgtatttaattagtagcttctaggtagggaaattaatcgtagtatcattgttagaatccattggtttttagtcttagatgaagtagcaatggaggagaaactaacattgttgtctcaaaactctgcagggtccaaacccactttcatgcatgaagaaaaagaaggagaatcctcaatccaaatccaaagccgattctaactctaatgcacaaaaggtaacattagagacatggctccattatgtttacaagtaaaatgttccagtgttgacacaaattcgatatttgttttgggtttccaggaaaagaaagaaggcgggagcgatacacaaaagaggtcaagaaaacggtcaaaaaaaggaaagtctggtccggagagaaccgagtgaaaacagttgttttatatataacacatcttgagtccttactttttctactgcatacaaaaattttggtcaccaatcagactagagcttgagtctcattgctgttatactctcattttatttcaagcaaagacgacccgtgtaacagagactcccaaatttaacagagaccaagaagccaacttgaaaaaaacattccccaaagatatcatacgctgaaactgagtcccaaggaactaggagcatttattcataatttaagacagaaaagttcattgagcatccgtaatttggatgcttccatacaaataatgagcaagttctagatggcatagatgtatatattacatcgaatttacttgagaatttggctaccataatcatcattgaacttgtcgtaaagatgggcgtgcagatgagccgatggtcgagtgttgctcagagctcgatcaatgtcttctggcaggatgggaccaatttttggcagctctgcaagacaaaactaataatgtcaaagattctgcagttttaaaaggtaaactatgccaatgacggattctttttaaaagagatattaccgtcttcaggcacaacatcttctctgtcttccaaaatagccaatgtgcgtctcagtggttgcatcgcagcttccttacaaagtattcgaatgtctgaaccagagtagccctcagatttctcaaccaacacatcatgaggcaatggctcatcacctggttgtgacggtataagcatctcgaacattcctcttcttgcttctggatccggtaaaggtacaagaatctaatggtttcactagttgaggcctaaacaaaagaaaatcatgatacaagcatttttgttctatgagagtaagtaaaaggatactcgtttctctagacgccggagcatagctgcatctagttcccaggggagatttgttgctgctaaaacaaatacgagctcattcgttttctgtaacccatccatctgcaaaatttgaacaggtttattactgatggtccggaaagatgatgaacttttgtgagaaccaattcatttttgagcattttacctgaatgagcagctcggttttgagacgcctgctagcttcatgttcactgcggccttcaccaccacgttggcttatgatcgcgtcgatctcatcaagaaatattgtcgaaggtgcatgatgcctagctagatcgaacagaactcttatcaacttctcagaatcacctgaaaaacattgaaaagcccaaattttatttctcctaaagactgcatcttatttcatggttaagagtaaataaaggtacaaaatatttcacctctccatttgctaacaacagatgaggctgagatgttgaagaatgttgtattgcactctgtagcaacagcctttgcaagcatagtctgcacaagacgaataagactgttatgcatcaagaaaataaactttacaagatctaattgagctaggctcaagaaattagttaatggtttggtgtgcatatgaattgaaatgcaaaagagagtaagagttcaaaagtaaaaacacattcgagatagaatcatcgcacctttccggtaccaggaggaccaaaaagaagaattcctttccatggagttagtagaccattaaagtacctgacatcagaagttgagattcaagtactaaaataaactgaaaggtatcaacattggcaagaatggcgtagataacatacgtggggtattttataggcatcaccacagcttctttgagcaactttttagcgttctccaaacctttgatgctttcccacttgatatttggattcccacggatgatatccctgaaacacaccagttcatcaaaaaaaacaagaacatgatgtccaagagcaaaaatatatcagtagccacaatgacttacctactcaaactctcagcgagagtacgagtttccgcagactcaaacgggggaaacatggactttttcctgcagaagaaacattcgtcagatccaagactataaacataacatctctatggacaaagaactaataagaaaaagcaaaaggaaagcatagatcttacggcttctcgcgaatcacattgccattggccaaggctgtgttaccatcctgcaatcatatcataaatcttaaaactttgatcatcttaggagaaagaacacacgccattttatgcttaaagcacttgacagattccaggaagcttaaagtaaggcaaaataacctgattggtgactggggaagagttgttgttgacatcaccgttattaccgttggatgatccatcttctggttggtccttgtttgatacatcttcttcaggcagcttcttcctcccaaacttggcatcataaaacgttttaaattcctaataaatacatagatttcttgaacaaatcgatcaattctccaaactcattgctttgaattcagagaaatcgaaacagcttctttgttcactatagggtcattgaaagtgaccatttttcgtatcagaaccaaattaaaaaaaaaaagacaatctaagttggaaaattaagttgaaacacgaattcctcggtttctccggtggtttaagaaaatctttaaaatacaaaaaaaaaaaaaaagattagtctaagctgtgatattgaagagtttgacttcgatttgggacattgaactactctaagaaaaaatactctaagctgcattttacaggaagtaaggtgagagagaaatattaccagaaagctccagcgagtttgagaaggctcatcggtggccatctttgaagatagaatagatctcaaagctgaagaagaagaagaagaagagaagcagagagatgtctgatggatggcgagagttgaacaacaacagctctctcgcttacatacatcaaccaacaggcacgtgctacacagttggacaactatttgttaatcaagaaacaaatctgtaattattattattatttctaattgctaggaaacacatttccaaatcagatccatggattcttgttttttgtatggattcacatgaaaaatgtctcgtttttttttaaatttaattttgtaatttttctatattttatataaaaaaatttacatgataatatgtagttaaacaaacaaaattatattacctacgagaataacatttttaaaaaatcacaagtttagtaaatattattttctcaactaatactacaaaatagtatgggggcatttatatatttttatattgtataaaatgacagtgtactatgaaattaagaatcaatatagttttttttttttggataaagaatagtattaggtatttcaatattagaaaaaaaaaattgcaaaagagaaaataatacccataatagaatggacgagcgtttgaagaaaatgatggagtgttaggttaactttcttataatactattttttaaggctaattttctgctgcagttttgttaaacaacaattctaccagatataggggttagtatattttagttttaggaatacgggaaagcatcgataatccgtgtttttttttttttttaagaataacgttttctgatttctttttaaattcaaagtactaattactaaaagtgttcgtgatctcatgatgtcacatgttaaaacccaacttttttccaacaataataaaactcaacaattagccgacaattgtttttttcttttcatagcactacattactgtacagcctaccacacaaatatatatatatttttttattaaaggttattcaatttattgttttccacaaatatttttgacaaatcaataacatcatggcactcttgctgacgtgacattgaatttccgaaaaacaaaattactagtatcgccgctttattgtttttcttaacaaggcgaggtatattcattctactactagctagtttgtgaaaaataaagttaagtgtgatttaaacacaaatcaaaacaaaaaagattcataagcagtcaaaattttcgttaacataaatcacaacgattacatgcttgctttaaataatacgaccagctataagattcagttacgccataaccatagaacccgggcacactttagacgtgcttgctacttgcttcttctttttttgctgttactcttccggatgtgaaaactgaaatcaacaacttaaaaatccagatatttttaccaatcttcttatctcagtttcctgattacgacttgttcgtcctcggtaatggacttggcttaataacagaatttgaaggcttccaaattaatattcgacccataaacatatattttgaaaccccccctaaaagatgtcctatatgggcctgattacaagaagcaaaaaataataatagctcaaacattggatagagaaaatggaggtcgtttctcaaagagaccaagcctatagtcaccaagcttagttttgtaagcagataacttgtattgagaccaagtaaactcattataaaggcaatcatcttgctttggcacaaggcatgataatggtgcaatcttctcgctcaaaggaggacctgcgaagtagatcatcgatatccttgacctctttgtatttgtcaccactctatgtttcacactcttgaatcttccgtttgtcatcacctgcattaattttcaaaagccaccaaatactccttttgtattagttcctatacataaagtctaaaactgcaataaatctaagaatatataagtttctataaaatttaaaatatcacccaaatagcacaaaatataataaactcataatgtaaattagtagtgatagatatataattaaaataaaaagaagtagcaacagaaagagtacctgaagagtatctccgacaagaacgaagaaagaggagtgatcaggtgtaacatcaacccatgttccatctttgacacagatttgcaaaccctctgtgtcgtttgatctgagcagtgatatcaactgtggatcagtgtgctcaccgaacccaatctcttccttgaccggagtctcttccttctccgggtaatggttcattctcaggcacgaatcactttctttcactttcaccaaacggctcagcttctcctttggctctatctttagctcttcctctaccatttccagaaatttgctcgacattctcttcatctctttaatgtactcttccactgcctctctgttgcaatccaaaaatgtatgttaaagaacagaacagaggatctctgtttttttttttttttttttggggttaaaggacaaattttcaagtaagaaatctttgtaaaaaatttggatagatttaagccttattcatcggagaataaaacagaataacccctgtttctcgccgttaaacatggcaactctgatttcatgggtttttttccggaaatgattgacgtataaaacaatagttttcgagtatatttatcatgaagaaggtgaagagaatggtcaagatcattgctctgtttttgtttaaaagaacttgtaaaagacgaaagaaacgttttagtttttaggttgatatggttgttatacctgaaaattgcaggggtgtgccggaaaatggcggtggttttgtgagactcaaggcaaagattagcattaaggagaatgtactcaagccagccaaggtcaccattgggtccaatccttttagtaccgtaaccaaacgggtcaggtggacccgctttgtctttgagagagtgatgcaaagcaaagaagttgatggcttcttgctccaactgagtcaaaagatcgggtcggaccccatggttgatgactttgaagaacccaaactcttcacatgccttgacgatttgggttttggcatctgagtcggttaagtctataacagggattaaaaccggacgcggtttgcattttggattaacatagaggttgctatcaaaactggctggctgtaacacaattaccatggtctactcttttggtcttttaaacaagaactttgaaaaataaagattgttgaaaagagagtgaatttggtgaaaagggtgttttcttagcactaatttatagtcgcttgttctgtgttgtattgtatggaagaggatatattatcacatttttttttaattctgtttttggttattctaattattttttctatatggtaaatgcctatatactggaaatgtaatgggatttctttttatttgtttggtatattatatatttgctttctattttttggacaaacagagtttagtatatattttctaatttcctttttatttacttaacaaatctaggggctgcggaaaacaaatatattctttgattagttatgattctatcattttttttattttatgttactccatacattattaagtttttatttggaaatcataaataatttggatatcataatctgataatattgtcttatgcggatttgaattcgagtggtgatgcatcaatgattctaaaacttcaagagatgatgatcaccactacataaacaataaaaagaggagaaaaaattaaataaatatttaaggaaaggggaaatataatatagagaaatggagtaaaaatctaagtaattatatcatactaattggatattaaaaattattttaatgaagttatatagatcatcacttttcaatattaagtttaatttaaatacataatagcaatatttatatctgaattaaaatttgaaaatttgatatcatgtgtatctttaagaaaattaactagtcatcaatactaatctaaataatattataatatttatttgaatctaaaattgtttcaaacataattcttcttagtttcttattacagttatttaccaaaaggtaattgtcaatataatactcatttagttttcttgaaaaatattattgaaaccatatccttattatttaattaaaatgtgttaattgtatgttctttatcgtttctccccatatttgataggaatacttttgttctataatccccaaaacgatggaaatgaattctgtgggatccatcattaagtagcaaatgttattttttttaagtgtaacttttgagaaatgaagacgaatacacctcctccttcttttttttagttggtcaccattcaaagcataaacataaatcattaggctagattagggattttaatctagtccaccccctcagcttcaaacattctcaagttagcctccttataaaaaaatatatgtttatttatttatttcaattcagaataatagtaaaagacaagtaaaactagagtttttcacttatttacaacccaacctctatgttggatctacatccataacaattttggatcttttcttctcaaaaaaaaaaaaatctaatttctcagatcaaatttttttcatcttcaatttatttttctttcaattcaacaaaaacaaaatttttgatttgtttcttcttcttcttctctttactctcttctctctattccatatttaatttttcgtctcctttttaccttttctttctttctatcaatccaaagatctatcttttttaccttttcatttgtttctatcaatccaaaaatccatctctattctatatatgatgattgatggtgttgtgtttaattagagttttattttttattagatttgatagtttgatcttttttttctttgattttgtttgaaaatgatggattttggataaaatttcgattataatttggaattttatgattacaattcaaatttgaattaattatcgatttaaaatcgaaattgtcccttaaaagcatcttctaatagccattatgacttagtttttaggattacaattgggattcgaatgaatttgaattttgttccttagagatagtttgtgataaaaactagaagaaaagggaagaaggagaaagaaattgagaaggagaatgacaaagagaagaagaaggcttcttgtttgagtctttagatagtgttgtgtttttggttttaggtataattgtggctaaatttttagatataattatgttgggtttttgggtttagatacaattgttcggctgtctttttgttttaagataatagatctaagcgtttagatacaactggtacgctcatgtacaactatgtatctaagtttatgtatgaatctaagattttttgtcaaaaaaaaactccaaaataaatatgaatctacacattaacgtattttgatccaaaacaaaacacaaaaaattatgaatgttaatattttattttattaaacaacagtgttttgaaaaggaaaaaaaagtttgaaaggaaaaaaaatagtttatttaactataaaattaagtattttgatgacaaaaaataaactaaatatttttatcacaaaaaaataaagctaatttttattataaaatatctacaaatatctaaaaaatatctataaatatctgaaaaatatattgcccatagttgtacagttgtactcggttgcacatttttgctcatagttgtacaatatcgagaatataataaatctagttgttatcaactcaaaactaatttttatgggtggaacatatggtattcccctatcaaaataccattactttgtatcggtgtatttatatttatctaattacaagtatttaaattttttaatttgttttgttaaaatatacaaagtaaccatgaaagtataaggttgttagtgtatgaatgttagattttgtgataagagtttcattaatttagaaaatatgatttttgtcaaaaactaattatgtaatttcattaccattgtgtatgcattatttaagttttcttagttttgtttaaatttcatattttataatattctgaaaactagccaagtgaatagaccttagttgtgcgggttgtacttagttgtaccaatacaaaacatattaatttgtataaatacaacaaaaaaaattaatagtatccattataagcaatgcgtatgactgaagtatttttgattataacttgaaaatcaaagagaaacaaaaaacgatatgtaattatatgttttcgtagaagtccatcaacatagttgtgcttattggtttcagttgtccagcgttttttgtaggtttaagtgattaatgagataagagagagaatgcatatgattggttgattttaataaattatttggtagcaaaaattaaatagaaaattaaaaaaagtaaaggagaaaggtaaaattgtatttcaaataggttaggaaggagagggggtagtgagaataagtgagggtttttcaaaaattgattcaaccaaaaggggtcaaagagattaaaattcctagactagtctccacatatctcatctctttttccctcttttttgtttttttttttgtttttttgtttttgtctgagatcagtttacacatacgtatgtagtcgagcggatccagagtgtaagagggtggaacacgtgccccacactgattattgttactctcgtagattaattggcaatctcaaactagattataagggtggtcgggtgttcgatgccttccacttgcttttttttttccttttttctacacatttttttacatacatatacttacatactattaattaatgaaaatatttacgttgatttctttcattctccaataatatatgcattcagatgagaagttcgtgttaagtaattaaaataattaatggatggttgtgatgttgaaaaaaaagattaatactattagttatttttattatatttaatatgtgttatgtgctaaaaaaattcctggatccgccactgttttatatatatataatactgcagtctgcatgtacttttaattcttcagtaatacgacatcatatttatatacgtaaaatcgttagagtactgttaacagatttgtatacgtaaaaaagttagagtttgaggtactgtgtagtcgtcagatttgtatatcctatatttaaccttataagattcggtcgacatcgatttgtatatcctatgtttgagatttcggtcgacatcgatttgtatatcctatgtttagttataaaagattcggtcgacgtcgatttgtttttccttgatattttgcagtgaaccattatcaacacgtgtgacaaaatgatgagtggttctgttaaatcacgctgagtcgtcgataactgaatgtcgacacgtcacatggttgtgatgttgtgcacaacctacgtcgtcgcgtctacctggtacgtatacgaatgcgtgtttctattattggcatgctttgtcttttttatatattgagacactatatttctgtcggattattgggtgatgcatatcatcgatcacccgatactctttttttttttttttttatcattcaatactttcgtatatataatgatagaatctatttttacggcggtgacacctcggaaatgcaaatatctctatacgtagtttgcttttatacaatggatctataaccatgatcacagcaaagagattgataatgtctatatacatataattcgcccaacttgttctaggtggtgattgaatgctcaccattttcaaggattctcaccgattcaagcccaaactttgtgatagcactttttattctaattttcaacatatataaaaatgtagataggattataggaatagccgtatatatatatatatcgtataaataagttacagaaaaagataattgaatatatcccctatgttatttgagaaatgcgaaaatacatatgcctttagtctttttttctttcttaattttgttttgtcaaaaaaacaaaaacaacaaagaagactagaagagtatttaagatactataatcactatatattgcataaaaacaaatacaacgtgaccgagtgcaacaatcggaagaatatccgtaggaatgaagttttctaacattcgaacattttttaaaatttattcaccactagccgctggtggcaagaatgtttttaggcacgagataatttttaagtaatcgatcgatctaaaagtattaattaatcttcgaagctgaaagggtcaaatccttcaccaatagattttctgaactctttccaacactgcttggcttccgtgtctttgtctaacatcgtgtatataattgcctgtactttagaaaacaacattaatttcagcaactataacaatgcgataaatttctactaattctctatataatcatgaaaaataaaaaataaagatttattatgttcacggaccttataaagagggatccgaacatcagaaatttgggcattctcgtcatttagacaactatactcagcagcttcttgatacctttcctggaatattgtccaaataaactaaccattattcatagattttaacatgagattatatgagaaaacagctgcatgcatgaaagattatatgataagaataattgaataaaataccagcaatattaaaatttcaacaagagccatctgcacgttgaagttggcctcaggctcgtttctgtatcgcatgtttgcgtcacgaaggagctgcaccgcctcttcacattttccttccttcatcttccgtaccgcctccatctatatttcccacaattttaatttcattgagttttttttttcatttaaactgatttgaatatatgtatatatgaaggtaaataccgaatttaaataagaggaagtaacatatataagaaaagcaaaaccgaataatccagctgtttgtagtggttcaacaatactcctagctagtcttaaaggatcaagatctcacgtgacactaaactatttgaacaaatatttatatgtttgcagattgtaccttgatggagtcaatatcgtcctttgaaggcaaagaagggagcttgtgaagattgaatggtttttgagaaggaatgggtttagccgaagcaagcattgagctaacttcaaagagagaccgcaatgcgaatttagctgggaaaggatagataccggaagtagcggatgcggctgaagtcggcttcccggatatgatcatgtcggcagagcttggataggcagctgccgcggcagtgtagctcatattatttatcttaaagccaaagatacttatggcgcaagctagtgctagggatgctcccgccgccattttcaatggccttaattgctttttatcatcgtgagaatcattcttgctgtttgatttggcgaccgtgattggtgatctgatgatcaaacggcggctttgacctccattggaggggaaaccaatatatatgttttggaatctaagagttggtttatgtgtggaagtgaaatgagataaaggaagggtgagtttttgagtatggccttgaagaaatgtagaagccatttttcttcctatgagttaataaaattggatttttattgcattggttgatctttgtgttagggattggttcttaaatttttagtttccccatagacaatttgagagttttagacttttaggtgtgtgaaggaaagcatcaatttgttacttcagacaaaagaaacttcaatttgaaaaaggcatcaaatgttttgcataaacaaacagtactgttttggtatcctttctttttcgaattacatgacaaatgctttctctattggaaatattctttgttcaatgtgtctcctctattaaagtatattaacttctttacctatgatgcaagactaacattagaataacttgaatgctttcatcttccatttgcaatccaattattgtgtataaaagaaagtttcgagaaggattaaaaaaaaaaatcattccaatagataatttaggtaagtatatggtgaatcagtccaagaacaagtttagcatgaaaaccaagtatggagcagcagttgcacctgtattcctccttgctgctgcatatgtcgcttggaactacataaatcgtggtttatggagaaagaaagacgatgaaaatggtcgagatacaagaaaaagcatcggtaaaaacatttcagaacaaagaagagatggtaatgttaaaaacatgggtaaggaggcttcttcaggaagagatgaaagaaccctctcaaaatctgtttcaatgggagctattcgaggaggaaaattagcactacagagattgcttgatttgcactcataccgcggtgacacttcttcccttgcgaatgctgaactcgaatttgaagcattgctttccaaggaaaagccggacttcgggttgcttcaggttgttcatatatagaaacttttttgctctttcggatcaaattgcatttagttaatttcttctccctcatgcagagagacattgtaaaaatggaaatgagtggaaaagaagcaaaaggagctgagctattgaaaaaggcattggagaaagcaagaaaagaagggaaaggtcatgaggcttatgagattgagatgttgcttgtggagatgttgatctacttggtttgctttctgaatttcctttctcatatatatgaatttttttcaccatctttataataaatttatttctttgtaatagggaaacatggaagaggcttcaaaatgtaagtgtttagaggatgaagtcataacagatgcaagacgtcctctatatcaggcaagtcatatacatagtaatccttaattccatttttttacttattgttgtgaccaatgtcgttttatctctcagactataatccattaccttcaaggtcatcctatgaagcaagtcgaggagacattcaacaggttcagagagattcaaattggtctacaatggcctggaagctcagaagaatgtgaaattgaccaagtcacatttgatgagttcaagaaagttatggaatctctcaagcatgaaatcgaagacggcaacaaaagaaagttgaagttagtcaaagataaaactatgagagatagtcttcattaatttcaagcaatattagtgtgttattattcaagaatgatcataagatttggtacataaataatgatactcttgacaaaatacatcaaactagacccaaaaaaacatttaatatacttatatacatgtatcattttcatgatgaaacaaatttgaatgtatgctgaaaaatgttatcaagtaaggatgtaatcttttgccaaaaatagtaaggatataaaatgtatcactgaaatgaatcaaaacgatattggcacaatggtttaagaaaaataaaagtcttattaaagtagacgagctcttagtgggccgattagaattggaaaaaggcccaatcattgtctcgagtagaagtgattgtgaatctgaaatttgctttcttctcacagagaaccctaaaaccatttccgcggcggcgtttctcggaatcaatggcgagtctccgaagagtcctgctcaacgtaacttcctattgccaacgttctctcactcaatcgtcgtattctacgtcggggatgttatcccgatcggtggtcaagcatgcgaacaatctcggtcaaattcaagctagacatttcacgacaacgcttatgaaatcgggaccaaagcatagtggtacagagcaaggcgtgaagcgaaacagtgcagatcacagacgtagattgctcgcggctagatttgaactgagaagaaagctatacaaagcgttttgcaaagatccagatcttcccagcgaaatgcgagacaagaatcgttataagctctcgaaattgccgagaaacagtgcctttgcgagaatcaggaacagatgtgtgttcactggtcgatctcgttctgtgactgagctgttccgtgtttctcgaatcgttttccgtggattagcatctaaaggtgctttgatggggataacgaaatcgtcttggtagctgcattatgtgactgatctatgtaagtgtttttgattctccttatttttctgtgtttgcttagttacttagatgatgatgatgatgatgaatgaatgatggtttgtttcagggaagaagctgattctgaagaaatgggagcaaggaatacaaagaacgtttgtggtaaatacagttaccaaagtagctgtttgtatgatggtggtggaaacattttgacaccatcacaaaacttagtttgcttttcactagtgatgctctctctttgttttacgatcttgctcagctattctagcaattctcgttgaataagttatacaaagtcacaaatcttgcttcttttttatgatctcgattttgtagtttattgtagcaattgtggttgaattaagtatgttatagacaactcatagagtcatagacttggtgtctgatgcattgttaagtagacggttataagcaagcagcttaggagcaatttagatgggacttttatgctgaggaagtaggtggtaactctgtgaaaaggagggaaaactcactaaactaaaacatcaaaacgtagtagtttcatatgaaatcaacccccatattatatgctaatgtgccatttgggatggtcaaccaaaatctaactagaagtaagcaacactttagattgacaaggtattgtatagtaaggtgaaagcattcagcatctaagcttgagaaagcggacatcatctatgatcaaccatcgtttaaggttagtgacagaatccatgtcagacttttaacatatctttacatatgcatccatgttagggttgacggctttgactgaaaacatttatgcaaagaaataatggcaacaatcataatgtttgtgtaacataatacaatagtagcacttaggtacttgtgctttgtttttcacattgttgaaattcttgattgcttcttgaaacacttattcacattgccattgagtgtctctgaatctaaaaccagcccatttcttcaaaaatctaaaagatgtctttttcctcgatctccaaaagatattgcaacaatccctccccacttgttcttttcgtctacacagctctacccttggactgatataaagagtaaaaacaagttggctatttcttacaaataaaaagaaagaaaagaaaagtggttattggtccatattagataaatgagtaagagagaacctagtaaaccactgccgtagagaccaatgactacgaccaccacgcggtttgtgatgaagagggtcccaaaatggatacacttctctacctattttttaacatatcctacaaaatctcaatggtttttatttagttcgataaagtattattccgaatgtaaatagtggaacaaaaagaacagctgggaggattttgtttaaaaggacactacacttcccagctttccctcactgcccgaaaagaacactgcagaaacactttcctctgttcacagagaaagagagagatgatgctttacagcaacaatagttggagatcgaattccattttaatacttctacttggtctctccattgtggccgccgcagactccgccggcaaaacttcaccggtcgaagacggtacgctgttcactaacataatctcatcacttttcttggttttgtttttggggggtatagctcatagtgttaatgggttgacgaaagcatgattctttttgcttctgtggttatttgatttcggaaacctgacccattctctctgttctctctgttccaagaacagaggattcaccatggcctgttgtacttagttcttctttctaaaacggtttactttcagatctgtataacacaaaaaattggataagaaggaatttgaagttataatatccacttcgattagaaagttgggttctagggtttatcctcaatctcacttcttcttagtcctcttgttgctcagcactaagactttttaagtcggcttgtaatcttgggtttaaattcatgactgtctcagctgagcaatgactaaaaaagtttaacctcattaatcctaggtttaaaatatgctaattccaatctaatctgtcagactgtcacaaatcagaaagaaaacaaaagtttttggatattttcgttaatttagtatagttgtaggccatcctgggtcaaagaatagaagagccctcctcaagtccttgagagacagttggattcaattcaagtcttcaagttataaactcatctattttaaaaatttgtctttaactctttagacatctgaattagaatagcattaaccccttaaaagttgtagtttaaccgttcccgccatgtgcattcttttgttgttagtttatttcttacaaatacaaaaccctaattgtctcctttcttttgataaactaaaatgaattaaaatcaattgtaactaaaatgtatcttccctaaagaaaagggcacttgtaactgtagagtgtagacacaagaccacaaaatgtaatatgtcacgagttaatgcttgggaccgagagaataaatggttcaattctcgtgtttcgccttcactacttttgctatttttaaaaaaattggttttatcgtatttttttctccttttgtgtacaaataatttaattaccgtagtggctgataaatgtgagctcacgagaaacgcgagaattgaatgaatgtattttgggatgatattgtttgtctagattacaaaatcttgaaagaatgaatggcccaaaaatggacgtaaaagatgaaagatctattgttgttattaagagaccaactaattgttatacgtctccatcctagtatttttattttctgacaccattttcttaaatcccgtaattattccctttttctcaataaattacaactaactttcttgttctgccggaatcttttttcaaggcttggtggttaacggcgactttgagacaccgccgtcaaacggcttccctgatgacgcaatcatcgaggacacctccgagatcccgagctggcgatccgatggtacggtggagctaatcaagtccggtcaaaaacaaggcgggatgatcttgatcgtgcctgagggccgtcacgctgttagattaggaaacgatgcagagatcagccaagaacttacggtggagaaaggctctatctactccgtcacgttcagtgcagcccgcacatgtgcacaactcgagtcgctgaatgtttcggtagcttcttctgatgaacctatcgcatcgcaaaccattgacttgcaaacggtgtacagcgttcaaggatgggatccatatgcatgggcgtttgaagcggttgtggatcgcgtccggttggtttttaagaaccctggcatggaggatgatcctacttgtggacctatcattgacgacattgccgttaagaagctctttactcctgataaacccaaaggtaacgttatatttaggttttcgataccaaagttttataaatcatccaatagaagagatttagagtaaagttaaaagtaaaattttgtactttttacaggcaatgcagtgattaatggagattttgaagaaggtccatggatgtttaggaacactaccttaggtgttctgcttccaacaaacctcgatgaagaaatatcgtctcttcctggatggaccgtcgaatcgaaccgagcagtacggtttattgactcagaccatttctcggtccccgaggggaagcgagctttggaacttttatcgggcaaagaaggcataatttctcaaatggttgagacaaaggcgaacattccgtacaagatgtctttctctttgggacacgcaggggacaagtgtaaggaacctttggctgtaatggcttttgctggagatcaagcacagaactttcattatatggcgcaagcaaactcgagtttcgaaagatcggagttgaacttcactgcgaaagctgaacgtacgaggatcgccttctacagcatttattacaatacgaggacggacgatatgacttcattgtgtggacctgtgattgatgacgttaaggtttggttctccgggtctagtagaattggatttagttttccgctttttattcttctttctttggttttcatctagattgttccggttcagaaattgtattggtagaccgggaattaagacgggattccacgttgtatgatgtatcgttgtatgatggatcggttcaaggtacaagaaatgacaaagtacttatgcaattcatgagtttagagcaatcatgcttaaacaattatcaaactagctaggctatacatttttgtagctttattgcaaattaatgtaaactagttcttggaacctagtcagattcgtgcagcttttatttaacagtttgagatagctttcagtgatatcaatgtctaagattagtttccatttatgtggattggtctcttaggaaacgaagagaacattttcaaggtaatcttaaaaattaaaacactaaaaccataaacgtgtagtaaatacattgcattatgacacttaagttatctttgtctgctcgctctgtttctgcatgaggaattatattggtcttttcaatacacaacgacttgaatagctcatgtgtcttatatactagtgtttcttattttacatctttgatatgagatcgtaacatgcttttccttgagacaatgcttcatttatctctctgaccaaatcgaattttattttggaacaattaaacacatttagatttataagactcttaccatatcaagaaacaagatttttcaattcaaattaatgacaaatgaatggattaactcatattactatttaatatcccatattaatattagccctttcatatttccatgtgagatcctactactacatttttacaataaagcatttatccatgtactgatgtacattgtgtagcctaaaagatgtgtgtatccgttttatgaattatgaccatcttcattaaaacttctcaaaattcagaaatgacatagatctagaaactttggaagtcttcgagactgaacatagaattctattccacggagctaattaatgacgtttcattgacttctataaatattataatatcaaaattaggggaagaagttatccaatggtgtaattatcatttgctgatttttcttcacctttccaaaatgattcttcaaagttcaaattgtatgttggaagaggcggaagaaaatagaaaaatcaacattcaaaaaagtctgaatcacaagagaaaatgtattatgattctcttttctttttttctttttcttttggtaatggattagatttttttttcttaattttttcaaaagtgtaatgttttttagatacttaccctaattaaggccaactaatcagaagaaatattttaaaacgtcgtcctatagttaattattttaatagaaatggtttacatgaatggtttaagagatctctttagaataatataaacgaacaaagtaaagaatcttctaagtccaaaacgtgaagacaataatctccaatatgttttcactccaagaactttctaaacgtggtataagactgatagaagttctaactggtattggacatatataaatgatagataactctttaattgcatataaaatctataattttctcatcgtttttatatttgctactaaactaaattgataatttagtcgttctagttctcactatttaatctgtcacattcaaatatctcggccagtcaaaatccaatacatattagtttgtgttttatacgacattactcgtgtttatctttctttcttttttgttaacacgtatttgtgtttatctcaatgtttagatgttgaaaagtatatatgctgattaataaataacaatttcttagtcaacaactcaatgatagaatgttatataactctcttacatcatttacatttttaaattgaatgaattctcatactatgcaatctacctggttagggtgaagtcacaacaacaacaacattaactaataacaacaatttaagctgcatgtcctaatcagaatctcggttattggtcgctcataagaacagttagaggtctttcagtcacaattgagagacgacatacataattggatgggaatcaaaatcagtttaattgcgctatacgcaacttgaaacgtcattatacaccgataagctttaaaaataaaatgttgtgatggacacgcgcactatatatgtatgtgtttggacatgattgaagctaaacaagataatatttattaagaagaaaatacataattattactaaataatgtgtattattatacgattccaacttttatttgataatgatttttgagcaaatcaggttgataggtatgattgagaccatcgcccaaactacaccttaaggtcttactattagaaacaaacaattcatttgggaattgaaaccaaagtcatctatggaagtaacctcaaaatttatctaagaaacagtgatgtattagaatggtcaagtcaacttattcacaaaattacaaaactatcgtttataaatatataatctatttttcacttgtgttacacgattcctcttttgatatgcaggaagaagagaagatcttacaacggctagaaatagaaaacttaatgtgctattaattacaacttaccaactaattagaactttctatatgaaccggatcttctacagcaaatcacggtcaattcaaaatattcatctctctctctctctccacatggacaagacatgattaagaaagtatataaaagaaacagagcagagaaagacattttgttccggtataccattgcaatttgcaaactgcttcaatccaatttccctaaacctcttagaaaattctgcaaaacccaccaaacaaagaacaccaagaaagacaaaaggcaggcaagactacaaagcaaaaccttcttcttcttcttcttctcgttactcaaatcatttccatatatacgcaaaaaccattaagacaagctagaaacaaagaaacatggttttctctgtttctatatttgcctctcttgcaccatacttaatctcagcatttcttcttttccttctcgtcgagcaactctcttaccttttcaagaaacgaaacatccctggccctttcttcgtccctccaatcatcggaaacgccgttgcactcgttcgtgaccccacttccttctgggacaagcaatcctccacggcgaacatctcaggcctctccgccaactacctcatcggaaaattcatcgtctatatcagagacactgagctttcccatcaaatcttctcaaacgttcgtcccgatgccttccaccttatcggacatccctttggtaagaagctcttcggtgaccacaaccttatatacatgttcggcgaggatcacaaatccgttcgccgtcagctagcacctaacttcactcccaaggcactgtccacttactctgccctccagcaattagttattctccgtcatctacggcagtgggaggggagtacctccggcggatctcgtccagtgtcactgcgacagcttgtccgtgaactcaacctagaaacttcgcagacggtttttgttggaccctaccttgacaaggaagccaagaacaggttccgtactgattataatttgttcaatctcggatccatggctctccccatagacctccctggctttgcgttcggcgaggctcgcagggctgtaaagaggctaggggagacgctcggcatttgcgcgggaaaatccaaagcgaggatggcagcaggagaagaaccagcatgcctaatcgatttctggatgcaggcgatcgtcgcggagaatccgcagccaccgcactcgggagacgaagagatcggtggtttgctcttcgattttctctttgccgctcaagacgcgtccacgtcatcactcctctgggccgtgacgcttcttgattcagagccagaggtgctgaacagagtaagagaagaagtagccaagatctggtcacctgagtccaacgccttgatcaccgttgatcagctcgcagagatgaagtatacacgctccgtggcgcgtgaggtcattagatacaggcctcctgcaactatggtcccacacgtcgctgctatagacttccctctcacggaaacgtacactatcccaaaaggtacaattgtctttccttcggttttcgactcctcgttccaagggtttactgaaccggaccggtttgatcctgaccggtttagcgagacaagacaagaggaccaggtgttcaaacgcaacttcctagcttttggatgggggcctcaccaatgcgtaggccagcgttacgcgttgaaccacctcgtactcttcattgcaatgttctcgtcgttgttggatttcaagaggcttcgatcagacggttgtgatgagatcgtgtactgccctactatatcgcccaaggatgggtgcaccgtgttcttgtctaggcgcgtcgcaaagtatcccaacttttcctaaattttttggatttttcttaaatttattcttggtggtcaaagaaaccagtgtgaatttatcacttttcgtgatgtgtctctcgaagtgagtggcccacgagtgttcttgtcttattgaatttgagaagacttgtctttgttttgccatgtcttcaccatatttgttttgtgttgtcttccagtgaacatcagtgatgttacaacgtgtttcatacttgtattttttttcttgccgactttattctttgtccgtaactctcgttaactgatcaattcgtccattttgtattacattacccaaatcattgattggtttcgtgctacttaaacaaagacttttgaaccatgttattgtttttctttgtaccaaatcaagatttctatcacacgagatctctagggatataaatccagggttttgtctagctatgataattggttccacatcgaaaattctttgggtgtagcatgtgtatgtgaggtagtggaacatgaggaccgatcgtggcctaacgttcgatcttctgaggaaattgcagtagttgaagacgctgattgaaacaaacgaaggtctactagatataagaacggttgtgatatacattcagacaaaatgaattaagaatttatcagctagattcacggaataggaatctaacgaaaaacaaaaatgagagtatacgattcgaatgatttcaaaatctgaaatcggaaaatataggcccattgtagcccaatattgaccattatatattagcagacggcccatgtatgaaactacccgtgttcacccaaaaacagataaatattgtgatctttcaactccaaattataatgtgattttccaacataaaagaaatatatgaacgggtgagatcctgcgaacgtcgcaaaaatttgtttcttacaacatttatatctcccagcgaccactacagacaaaaatttaatttagattaaatgttgccgaattaataatagggagtgaatgtgtgtgcagcaacacgtgcaaagcgtgatcagcacttgaccagagtgacaaacctaccaatcaactttgcaatgaattatttgcgttctcgtaactgtaggagtaatttaaatacttgcatatgaatgattatatagcctcaatcacattacattaatgattataaacgtacctttcgagctctgctgtttaatagaagaaaattatataatcacattacattagtttgttagttttaactacacgcaatatttctataaacattttttatatactcatatttttttatcttatttttttttgtaaattgcatgtcattgtgagttaactgttttttttgtaaaacagagtagagattgaagatttgacaaaagttttcaggtatggctctaagctcgaagaaccaattaagctgaaaatgttttttttgtaatagatgatttagatgaacgatcctaaactctcgttagcacttgtaacaactttgatcacttctttttgaatttaatttaacataaaattcaaaagaaaagaagttaatgtggtgttatataagagtaacattacgttttaattaaaccaaaaagaaaaaagacattcagttttaatggacgaaaccgaaattttgaatttgacacaacgcaataacgcatgcatgcattttgacacgagagcacactgtatgagaaatgtaaacaggtactattggtttagttaggtgcagattcaaagactacttattaatatagcaaacagattatatatataacaaaaaaaatctctctactttttttttaataaaaaaacagagtatataaaaactactgactacatttgttcacaattactagttaatataccataatattgaaaatatagagactagtagctaatgactgtttgatgtcattgtcgtaacatcacgttagttggcgtacattcatgcttctttggattccaatcttcctaaatctttttcttatatagtagccttgtttgttttttttacttcgctacacttgtgtatgtattacttcttgtaaagcatattttcattattaataatatttacatgtttagaaaaaaaaaacatcaagttggttacaccaaccatatatattttcacgtatgtatcagacaaattactaattacagtggaaactgtattaacaatcatagcttttatatatatagcctttatgtaatttttggttttcatgttaaaataagccaggccctaagagagtgtcatacccttatatattgtttactgcatattcacaaaactcaaatacagagcagaaacctttaagagaagatctaataagaaagaagaggaaaaaaaaggatggttttctcagtttccatttttgcctctctcgctccgtacttagtctctgcgttactactcttctttctcatcgagcagctctcttacctcgtcaagaaacgtaacctccctggtcctctctttgtccctccgatcatcggaaacgccatttcactcgtccgtgatcctacttccttctggttcaagcaatccgacacggcaggcacttcccctggcctcgctgctaactacctcatcggcaaattcatcatctacatcagagacacagagctttctcatcaaatattctccaacgttcgtcttgaagcttttcaccctctaggacatccttttggcaaacaactattcggtgatcatagcctaatctacttgtttggtgaggatcacaaaactgttcgccgtcaccttgctcctaacttcacccccaaggcactctccacttactctgatctccaacaaatagttatgctccgtcatctacgacagtgggaggaaagtttctccggcggaactaagccggtttctatgcgagaccttgtccgtgaactcaatcttgagacttctcaaacggttttcgttggaccctaccttgacaaggaagctaggaacacgttctgtactgattacaatctgttcaatctcggatctatggcgctcccgatcaacctgcccggctttgcgttcaacaaggctcgccgggcggtaatgaacctggagaagacgctctccgtctgtgcgggaaaatccaaaaagaggatggctacaggagaggagccaacatgcttaatcgatttttggatgcatgcattcgtcacggagatagaatccggtaatccaccgccgcttcactccgaagacgaagccatcggcggtttgctcttcgattttctctttgccgcacaagacgcgtcgacgtcatcactcctttgggcggtgacgtttctagaatctcatccgaaagtgctgagcaaagtgagggaggaagtggccaagatttggtcacctcagtctggccatctgatcacggccgatcagctcgcggagatgaagtatactcgcgctgtggcacgtgaggtggtgagatatcgaccaccggcaactatggtcccacacattgctactaatgatttccctcttacagaatcgtacactatcccaaaaggtacaatagtgtttccctcggttttcgacgcctcgtttcaagggtttactgaaccgaaccggttcgatccggaccggtttagtgagacaaggcaagaggatcaagtgttcaaacgaaactacctagcttttggatggggtgcacaccaatgcgtaggccagcgttacgcattgaaccacctcgtgctcttcatcgctatgttctcatcgttgtttgatttcaagagacttcaatcggacggttgcgatgacatcatatactgtcccacgatatcgccaaaggacgggtgcacggtgttcttgtctaagcgcatcgtaacgtatccgaacctctgatttggatttttgttacaaattattggtgatcaaagtcaatactcatgagtgtgattactattattgttgttcgtgatcgtgatgtgtctcgtgaggtgagttccactagagcgttatgtcttgttgaatttgagaagtcattgttttgccattaatctgtactgtcttattttgtttggaccccagtgattctataacgtgtttcatgtattttatgtcattttctctatttttcgattcaaatagagataacaatatcgcctcgtggtatataacgacagaaagccaaaaccgtaaaagaattcacacattctcggtattattgtacatttggatcgttaagatatactaatatacatatacaaccctatagttcctgttagatttttacatttcattttcttatttacatttttgtaagataattaatattaatattttatctatacgattagcaagataaaataacactgtgacgataggtgtagtaaagtgttgatgtcgcaaagtaaacaattccgaaatttgatggcactatggttgccatgaagtcacccatgttttctcttagaaaaaatttgattcctagttttttattctctttttgtgtcaactgtcaaggtttcacactttcaattatataggttctagctactaaccaaagtttaagacctgattatttattttaatgatatttacaatttagccataaaagcaaagtacgtaaaaactgagaagatttactattattgtatatagttatcttatagtatagagagtatgtacagattgatatttctataaattaatcttagttttggtttaagttttggtttatggcttatggtttaagcctttggttaagttgtatataaacccccaattgtattattttctaaattaatgagaatgagatttaattgctaatatttacaatgcgaagaaaaatatatctgaagatgctgacatatgattttgacatatgtattgatttcttgtcaaacaattatgtttggataggagttgctgagcatcttgattaaacagtacaatttaatcatatacaagtccttttgtcatcgtcgagagtcttcatcaatggcgttggcgtgtcacaattatgcaatgaatgtgtgagatacacagtatgcaataacgaccttgattaccttttttttttttttttctttcttgcgctcgtgtttgcgtgtcctcatcacccactaatttacttcgttggatctcacaatgctactatagagtggattggacctatatatgtgtgtttgggctttgtcgtaacccacatctgtcttctgtcgttttgctttaaacagataaagtttggtagtttttcactttcatattttttggttaatgattttcactttcacccctcttcaaataaaatggttttttttttttttttttttttttcccgtatgtgtgtgtgcactatttggcctggtaaggatataatattgaaacttgctacaaaaatttgactagagagaaataataaaatgaggaggaggaaataaccaaatttcgggtgggctaagacttgattacaattaacagcccattgggcttttatgatatcagttttagaattagggtttttgggcagatgctcatttataaagaagaagaaccctagccgcttatatttggttgaggtttccaccgcattgtctctctccagacgaaaaatgggtgctttcagggtaagctctttgattccttgttgatttcaatgacactatttgctgctgattcaagtttcggactcgaagaaagaatctgatctaagctttgtctggtttcatttgcagtttcaccagtaccaggttgtgggaagagctctcccgacagagaaggatgtgcagcctaagatttacaggatgaagctctgggctacgaacgaggttcgtgccaagtccaagttctggttagtaatcatattctttctctctctcttttccatttttgttgctgctgagaatgatatgagcttgatctttaattagagtgtgttatttggattaggtatttcttgaggaagctcaagaaggtgaagaagagtaatggacagatgctcgccatcaacgaggtacttgttcatttgtgaaatgacgcaatctcgtttgacttcttatatcttattgagttaggcacttagattcatttatctggaaagtgaatgtatttgcttgactagaacactagggttttgattgatcacgtttgcgtctttgtttaacctataaatgcagagtcttttgtttgcctgactattatacaatacttttatgtaactttcaaatagcctgatcatgcaaatctctcatggctttgaatctatttgtatcatacttctaattttgctgattctgataatttctttgtctgttagtctaggttaatacttttcatttgctgtctgtcatcaaatgagaaaacttagattcaccaaagtctcttacttgattctctcgacttgctattgaatcgaaattgaaaccatatcacgtttttatcatgagtttatattgtttgattgctccttggcccctctcttgactaatgtaatctattaccaaattgtttgcacagatctatgagaagaacccaacaacgatcaagaacttcggtatttggttgaggtaccagagtagaactgggtaccacaacatgtacaaggagtaccgtgacaccactcttaacggagctgttgagcagatgtacactgagatggcatcccgtcaccgtgtcagattcccttgcattcagatcatcaagacagccactgtcccagccaagctgtgcaagagagagagcactaaacagttccacaacagcaagatcaagttcccattggtgttccgcaaggttagaccaccaagcaggaagctgaagacgacttacaaggccaacaagcccaacttgttcatgtaaaacgtctctgattgactcttttttggggtggaatcgatgttgaagctgtgctctctcccgttttggattttatcggttatttttgtttttcaatatgttaggcgtactcatgaatgtgaactcgactttgtctggattttatgcttcttgtttcctacttatgaaaaaacctttcccttaattcctatattttgtgctctttattgtgttaacaaccatcgcttctttaaagtgaaagattttaagtcttggactgtgataccaacttggtgtcagttaaaatacgtttcctctactgtaattttgccttcaaacacttaacatatgacaggggtattacagtcattttatgctcccgacagagaaagcatctcctttcacttaggatagaaaaatatagaaagattcttacattaaaaactgtgcttaatgatcccagaatcccagtagtagctctactcaaagtcaacacagctaccggaagaagattcgagtctctcggaaatggcatcacacgaccaccatcatcatcatcacgatcatgagcatgaccacgagttcgtgttatcattgattttctctgtaaagttctgatcttgatacgatttattcccctcactaatctgtttctctacttcttctgtcaagtaggaaatcagacggcggagaagggaaggcgtcgtgggtggggaaggacgggaaggtgtaccatagccacgatggactcgcacctcactcacacgaacccatctactctcctggctacttcagtcgccgagctcctccgcttcacgaccgtaacttctctgagagagcttttaccgtcggtattggcggtcccgttggcactgggtaatcatttcatgatcaaatttactgcttgattttgtaatttggtaccgtaacaaattttaatctctgggttaaggattaagcatgaatctatgataatgttcttgtctgggttctttggaatgctattttaagatttgggtttcataaaagtgtcaaactttttagtctaatcaccattggattgttgtttttgttgactcaggaaaacggcattgatgcttgctctttgtagattcttgagggacaaatatagtcttgctgctgtgagtattattatcagtggcaaacacaagattgttttctcgatctcactcatgtgactaaataagattttgatattgtaaacgttgtaggtgacaaatgatatattcacgaaagaggatggtgagtttctggtgaagaatggggctcttcctgaggaaaggattagagctgttgaaacaggtggatgtccacacgctgctatccgtgaagatatcagtatcaatttgggtcctcttgaggagttatctaacttattcaaggctgatttgcttctttgtgaatccggtggaggtgaggtttcatttctagctagttcttgatagttaatctgcacgatatatagatttctgtttctcaaggaaccaatgagatatgaataggcttagtgttgtgtgttgcagataatttagctgctaatttcagtagagaactagctgactatatcatctacatcatcgatgtatcggctggtgataaaataccccgtaaaggcggccctggaatcactcaagctgatcttctggtgcgcttatgctgccttaactcttcacttactccttttgatcaagtctatagtagtgtgaaagaatctcttgtggatttttccaactgcaggtgataaacaagactgaccttgcagcagctgttggggctgacttatcggtcatggaaagggattcactacgcatgcgtgatggagggccatttgtctttgctcaggttcgccatcttcagaaatatgtttcatcacttatataaccaatgaccttagtacttacaaaagagtcttctttgattactaaacattggcaggtgaagcatgggcttggagtcgaggaaatcgtgaaccatgtcatgcactcatgggaacatgcgaccgggaagaagcgccagtgatgatggggttcttaagacccaaaatggataagatatgaaactgaatggaactctttcaatacttatcttgaactcaatttatgcgcaaaagtctatgtaatctgtttgttgtactcaagacataagagaaataaaaggtttgagcatgagactcattacattctagtttattgtcctttaacagaggcaaatagatctttgtaggaacgttttggagcttcggcacgagcaactatctccacaaccttgaaagatgattcctcttgaagtaaagcttccactgcaacttctgcgaccaggtctctcgatatactcccttcatatagagtatcctacaaaaatcaaaggtcagatctttatcagtttccagcacaaaacagatgaaacaaatatcaaaggctgtgttttacctctggctccatgacaacatttccagttggaggatcgtttttaagaccaccaggccttactatagtatagttgatgccagattttttgatatacttctcggcttgaagcttagcgacaagagttagtccaaagaggttgaggaagaggtaagcagggttcagtatctgtcccatggcagctccattcaccaagatggagcttacaagaacaaacttttccactccttgtttacggcaagcatccacaagattcactgtcccgaaattatcgactttccaaggagtgaatatatcaaatccgggacgaaacccagtagcacaaatcacagcttgagaatcatcacctataacttcagctagcttatcaggaccttctgtcacgtctgctctaacctatagaagaaatcacagagcagttgtgagaaaatgagagcgagaaaacattggattaagaccaagaacatactatctgaagagacgggtcgtctttgaaagatgtttttgctttctctacatcacgaacaccagctttgacggcaaagccacgggacaacaactgctccacaatcctcttcccggtttgtccagttgctcctgcgacaaacaccttctttgtcttcactgcattctctgcttcacctttttccatctgagatacaaacaagcaaagtcaatttcagaattggggaaatctaaacacacaattcaatacaagattctagaatcaatggttttattacagataaatcttactttgatggaagtaaaggagcgaaaagatttgttcttggtgaagaaggaagactgagagaagaagacagctgaggaatgtctgagaagcaaagatgttgccatcgatgtgtaacctctctgccacaaacgttaacttttgttaaattgtaaatttttgatctttgccttttttgttgattagattacgccacgtggcaaaggtctccgacaatctgtttcagtacgcaattacggaaaaaccccaaagaggcagcgaacgaaagttcgattccgagaaagtgagagaaaatgacgaagagagctcccaagtcagggcctttgtctccgtcgtgcagcggaggctctagtcggtaagttttgtgtctggctttgataggttacagaacaagtttggctttttacacctggttttgctttgatttctctgtttagggtttaagggttctgcttagtctctctggttattactgattaagtggttagatagggaattggatatgaaagttgtgaactttatgctatccaatggcaaatgggtgagaagaagagcaaggaaagaggatgttagttagatttttgttaattgtgttgtaaaatcttggcaggaacttagagttggctgtgaagtcaagtgaaggtgcaaggaggtctacaagactgagacttcagcctttgagaaagccaaagacaagccccaagaagaaacccgttaaactccaaacgaagatgcccaagaaacctgccactgctttcttctttttcctgtaggtactctctctcatatgattccaaattgttatctaaatatttaagctcagctggacttccttaagtcttctcttaagtagaaatttgtgtgcattttgccattggtctttaggatgcgattatttatgttgttatgtgttctggttactttagaaaacatacgaagaaacacttgttgtattcattttcctcttgcctcatattgtcttatctttttggctccaaagggatgatttccggaagcaatatcaagaggagaatccagatgtcaagtccatgcgcgaggttgtagaatattactttgttggttttgtatgtcaaagtaaaacatggtggctattatgttcactttgattcttttgctaaagttgttttgttcttcattctgtacagattgggaagacatgtggagagaaatggaaaacaatgacttacgaggtaacatttgggtttcgcttttctgtcccagttagtctattgtctctatcttctaaaagtctcctctataatgttattcaaatcatagtcaaatgtatgatatctgacattgggatgactcacaaaagcaatgaaataggtttcatgttagcatatatagtggttggatagatatgttctaaaatgagtcaggtgttgccagtcttgttctttttggcgaacaatatctcattttattcttcttacctagatatctttggttgagaccttgacggaagtttcttactcctagattgtttgttcctcaactgttttgtaggaaaaggtaaagtattatgatatagctactgagaagagggaagaatttcaccgagcaatgacagaatataccaagagaatggtaccaccgttttcttcatttttccttgtttttgcttaatatttattcacatcagtgggttcttcatttttccttgtttttgcttaatatttattcacatcagtgtcccactgatgcggtgataaaacattagtctgagcttttcattttactattttgcaggaatcaggtgcccacgatgaatcagagaccgactcagactattctgaatagattactttttagtttctaccacattagaaacattgttctaagccttctaggatgggtttgtatatcggtgatatttaagagtttctgtttcgtttttgagatcattctttcactgatactcatgtttctgtggattgcatttggagatcaatgaatactaaccagtttcttgagtggttgccaaagggttttactgtttctttttattgtctcgattctgtttgaaacaaaaattccagactgcagagtgacgaaaaagctgatcaagtttagcaagtacacttgagattaatacagacaaatttccaggtacattttcatttgatgtcaaatagaaagtcacaccccatagatgacagaaaattctacaccagcaataactttcatgtgttggtaagttctgtaggctgatacaaaaaatagaatgtaactctaacaagtcggtctagctattttctggagagaagcatgaggcaagacgaagcctgcaagtgattgacttgaccttcaatcctaccatggactgtctgaagcctatctttgtattcattgagttcatcgagggtaagcgtctcaatggactccttgaatctctcatccccagcagattcaagcttctcctgactcttctcgcctcgttccttctcagcttcaacctcttggttgagcaaatcgagacgttcactcagcctcttcagtttaggcctgtaattaccacttttttcttcatcgccactgtctgaatcatcatattctctcatgaatcgctctgcaacagaatcaagattcggtttcccgtaggagaaaggcttgcctcctggtgaaaagacaacgatgcccaactcagcgttgcagagcgtggctaactcgctcgccttcttgaacaaaccagtcctccgttttgaaaaggtaacctgtcgtgtgttcatgtcctgaaccatctccatcttgatctttctccgacccatttgtttgctaaaacggtacgaataagagagaacctctcgtttttttttgctgtgaaagtgaatatgttggtgaagaagaagattttggtgttgtatgtctctgtttttagtaatggagatggaggtagagaattttcattgaacctaacgagggtcatatatagtaatggaggtggagaatcacaagggtgcagatttagcaagtttttaattgaaaatcttgaattgccttatatgggcgttgaatagtttctaattgtgtgtattcaaacatccatgaatatttaaattttcatttttcttttttctattgaatagtttctaattgtgtattcaaaacatacatgaatctttaacaattcatattttttccctttatttcttaagaacatagacaaaagatgggattcattaccttgtaaagaattaaaaatggtattcataattggtctttctttttttttttttttttatgtaattcaaaatttagaagtttattttatattctggtcgttattctccaaagtgattttttttttcttctttgtagacctctcgttgattaataagttatcgaccatgttatgtagttcaaaagtttttgcaaatggtgtcgttgaattaaaataaaaagttatggaccgtttcaaacgtttttgtttgcgaatgcccactgaggacaggagtccaaaggtttgcgagtcactcgaatgacttatgagttcagtcacattcaacttaaccatgtttttttaattagaaacctaaaacaagagcgtcgaccataagacctacaaatgctttcaagactccgaactacattatcaaaaataaagtctttgacaatttgcataccaaacacacccaaattgcatgaaaaattccgtgcaattaaatttgaacaagagaaaaattatgaccaagactttggattccttatcaccaaaactctcaacaatgcaacatcaaaatccgattgaagaagtcacaccaaaagtgaaagacaaaaaagttaaaaacatataaggatggtttgagatatattttagttattttgaagaacaaaaacaaacttgtttggactttgatgtggtacgatcaaatcatttggtattatctctgttcttggaaccaaactatgttgtgtgaacaccgaattaggtctaagtatgttcttgcacattagtaaatagtaagtgactgatccatcaatatcataaagcttcttaaatatttcacacacatacaaagtaatttacaagatatgaaatctgcatcacatttccaagatgcaacaaaccggatacacacaactcgatcacaaattaaactcactttccggggacgaagttggtagcgaaggcccatgcattgttgttgactggatcagccaagtggtccgcgaggttctccaacggtccctttccggtgacaatggcctgaacgaagaatccaaacatagagaacatagccaaccttccgttcttgagctccttcaccttcaactccgcgaaagcctcggggtcagtagcgaggcccaatgggtcgaagctcccacctgggtaaagcaagtcctctgcttctcccaatggaccatctccggcgactctgtagccctcaacagctcccatgaggataacttgagtagcccaaatggctaagatgctctgagcgtggaccaagctcgggttgcccaagtagtccaatcctccgtcgctgaagatctgtgaaccagccttgaaccaaaccgcttctccgaacttcactccgttcctagccaatagctcagggaaaacgcagcctagggctccgagcatggcccatctgctgtggataacttctagctcacggttcctagcgaaggtctcgggatcggcggatagaccggcagtgtcccacccgtaatcaccggggaactctccagtgaggtagctcggaggctcaccggagaatggacccaagtacttgactcggtcggatccgtaccatgggctgccggatggaccggtgggcttggaggctttgcgcatggtgattcggccggttccaaatacttcggaggccgccggggatagcttaacggcctttccggtcaaagcaggagaggagagagccattgtcgaggcggccattgcggtgagagtgtggcgcaagtaaaaggctctttagttaataagatgtgatgaaattggatagctaggttacggtgaggtttttgggtatttataacgtacatatgaattgcaaaacttgaagatttaatttgcttatctcgtgatatcgtcaatgccttgatttctattggttgttgacatttttgagcttagattttttgtcttgtcgagctggcatcagatttttggtttggaattgagttgtgttagataaattagatatctcgtagcatcttagcatattggaatacccattgtccattgaagacgtgccacttgtaaatctgacgtgtttctatccctttgaatcgtatcagtctcaaggtacacgtcattggtgtttcccaaatagacatgtcgtcaaagaatcaaaacaacatgatacaaagtccaaacatacttagaacgttgcatactacccactctttcaccaaaatgtgaaatatgagtgaaaactgaacatctcaattttcattactctaagtttgttaattatcttgttaaaaaaactactctaaattacagaagatttaatcctgataagaaagtacattaaaatgacaacaaagtaaaaaaaaaaaatacagttcatcttcaaagacatgttttctaattcgtattggcaagaaaaacttaccagtcatatttgttgccgaaaacattcaacaaaatcaatcaaaggtatcagttaatatcattgtcgacggttttatattattaacttatgatcgtaagaacttcgtatcactttttgtttcatctaactgcattgttttacataacattgatatatatttgtttggtaagtgtttctagtttcacttaaaaactttgtagtttggcgttcgaaacaaacttgataagaaaaaaaagaaaatattattgagagcatgaagtggattggaattaaagaaaacaaggaaaaagaaaaaaatagattggaataatttcaaatatttctttccaataattcaagcatttatctttgaaaatttccccaaagtttctttgtgtacaaatgacaagtgttttcgttgcagctaaagaatctagcaaaagcttatggactagagagtgacacataggacaagataacgacaatcccaaaatctcataagccaatcactaaacagatacagatacttcacagataacaaaccttactcttaacattgctataaagtggacgtataccccaaccattttcaatcactctcaccagtcacaaccaaaaaaaagaaaacacaaaaacaaagattataatggcttcctcaaccatggctttgtcctcccctgccttcgccggaaaggctgtgaagcctgccgcatcagatgtcctcggaagcggccgtgtgaccatgaggaagactgtcgccaagccaaagggtccatcaggcagcccatggtacggatctgaccgagtcaagtacttgggtccattctccggcgagcccccgagctaccttaccggtgagttccccggtgactacggatgggacaccgctggtctatccgccgacccagagaccttcgccaggaaccgtgagctagaagttatccacagcagatgggccatgctcggagccctaggctgcgttttccctgagctattggctaggaacggagtgaagttcggagaagcggtttggttcaaggccggttcacagatcttcagcgacggaggattggactacttgggcaacccgagcttggtccacgctcagagcatcttagccatttgggctactcaagttatcctcatgggagctgttgaaggctacagagtcgccggagatggtccattgggagaagcagaggacttgctttacccaggtggcagcttcgacccattgggcctcgctactgaccccgaggctttcgcagagttgaaggtgaaggagctcaagaacggaaggttggctatgttctctatgtttggattcttcgttcaagccatcgtcaccggaaagggacctttggagaacctcgccgaccatttggccgacccagtcaacaacaacgcttgggccttcgccaccaacttcgtccccggaaagtgagcggctgcttattatgtgaatgagagcagagaaagagagtttgtttgtggtctattctatgtaaatttgtgaactttcctttgtggtatctttgtatagaaatcgaacctctttttctctaactgtgttggcgttttatctgaagactcaattgaattgaaatatccactcttgtaaaattcatatgttctgtatttggacaaactaccaaatacggacgaacaaaagacaaaatgaaactatatatgagaaacttatagcaaaattacaacagagacgagaaagaaaacgaacaagataagtcgtcctaagatgatgccgtcgaaatgccacaagatgcttcactctaagccattttttgaagcttctctggttctaattacccaaaagatgcttcacttggcaagcttcaaaaaatactgatctttgaaaacaaatttttattgtcgatatgagatgtgtgttgtatctattttagcaagtttcacatagaaacctctgtgcagctttagattcatgtttttcaacatgtttctagtccctcctgtcaaaataaaatggttatagcgtgttaatcgagaattgtatctcttcctaagcgagtacacaccaagatcaacaatggctgcaatggaccatgcaaagtaaaaggccttacatggttagtgtgggatctggagaagaatgagagatgttaaatataaacagaacgagatggcagctccagcgagaacattgtggagcagcctcttgtcgtcttttgttggtatgaaaacagactttaacgtgtttgtaagctcgaaaagtcggtgggacacctgaagaaaataaatcaaaagaacatattacaataatagaacgtatcgtgaatacaggatttcttcatggattctacaattgctttaccaagacatagatggccgtgacgagcatgaagttgagcattgggtattctggaataatgcataatagccacttaggctgtccatttggcacattcgatctgcagaacacataatttgcagttaaaatttcattcctagatccttcagacaaatggtctcttgcctacataattgggagaaaggaaacagtttctcgctgaccttaaccagatgtgaaactgagaaatataggtttccagagtaatcttgccgagccacctacgaagatatgacagtcatgtcatattagagttgtgtacagaataaaacactaagcttggttagaatgagactaagattgagaaacatacgcaaatagtgtcatggagaaattacgcagctgttgtgtagaatttcgcagacagatgtagacgctaagacaaaataatcaaagctaaagtcagaatttagagagtaagacatctcaaagtttaatgtttggggtgaaagaaaacgggatttgatactaacgttattggaatccacgatgtgtagggatgatatttgttgtatgtaaccttgtcaagcttgtatatgtattcataccataggtaaccaacctgaacaatatagggaacaacttgggcatcagaataatatcaaatacataagatccataagccagagagaacccaaactcacaaatgaggaaattgcaattatgcttgtctttattgacatctttctcttggcatcacactcctccaatttctccatccatctctctacctgaaatgaaaatgtcaaaaaatattttaatcgtagggttcatgagaagatatgaaaaaacgagaaggctgtaggttcaagagttacagtgggatggaaataggcatatatcattccaatgatccatatgtagcggtcaagtcctgatctgaagtgccattcatgtaaaagtggtagttctggtttagctggatcagtgtatcctgtacttgtgtaaggaaaaaaactaaatgttagtcaacatacaaaaacactaattccagtgaccaagtgacaacaaacattggcaggatttttttagcacaagacggatatgcagtcgaccatgccgaacacagtaaaagatatgagaagagtctgatactgacccagtaagaatgttaaaggactccagaaaatctcaaaaacgccaggaatctcccacatcacgataaccacgagaaagcatgaagcaatcttcaaagccattactgatggtatttcgttatatcgactgaagataccaagggctccatacaccataagagtgaacagagtgtgcattggacagatgtagtacagcatataatcattattgagaataatgcagctaaacgccacaaataagttaagacgccacatcatctggaagaagtaaaagttttcatgagcatcttgagtcattgaaaacaacatgtcccttagaagcatatatcatggtcaactaattaactgtgcaattgaaatgacctgagtaaatcgtgctagggagaaatcctttctgatatagtaataagagaagttcccaaacccagtcatccagacgtaggcagcaatgaaaaccctgattgcattatatatctcagccgcagcaaagtaatgatacataagaaatagaacctgcaaagacacaaaaactgtaaattagcatggaaaacagttgcaacacacacaaaacatctaaacgtgataccaaaaaactcagatatattctgctaagcaggagcaaaaacatgtgaaaatgttaaggtcacctactgagaaaatactgaatcagttacctgcatccatcccttccactcttcagtctggtgacgattaagatagagaatggattttcctgttataggtgatttgtcattgtgtttcttcaaggatgtcatggctgaaactatgatgagaagacagtagagaaagaggaaaagatctctgttgtaattctgcaaaatggaaagtatacgaaaaaagtgtcacaaattgcagaaccatttttagactcagatgttagatttctatctctaaactattaacgacatctgtgctataacactatatataacacataaatggttttagaattttgatgaccagttgaaactgagaaaagaatccatcacatagatttaaaggaggcacctttttagactctccaagcaagcttgttcgatcactaatataaaagtaaaaaagaatagccccaaactcagccctgaaaggaagtaatacggtcatgagagggaatgaagaacagtatgaatccattctgataaaattaaggaacttacatcgctctcaaggttgctcgattttcaatcaagaaagagtcttccagcgtcagaaatctacaagtagacaaacgtaaatggtttatgtttgttgaaagaacactccactctaagaaacaaaaaaacacaaaggaagaaatcagtaaaactacctaatcaagtttgttttgataggtgagttataaaactttgtagagactgatcttggaagacctccttcaagtaaaactactccttcatcttccttgttttttacctcaccaagttcaaccaaattattatctgaatgactgcaagtaagaagtataggttactaagaggttagatacatataacaagagagccatttaaattagagtcctgatacatacactttagagtgcaatgaagacctcttatactctagaaactctgagtaaatccatgctatgaagacaggaatgactccgagtagaaacgaaacctgcattaaagaaatatgaaaggtcatccaaaccaaatctctggtgagaaacattttcaaaattcaaagttgaaagctactacatttgaagacactagcaaaatttgatccctctagtaaactaatccaaattgtaaattcaattactccacaacctatcgattatagtagaaatctcgttcaacagaaactattcatttcaaatccttgaaaccgtagcaaaaaaatgaaatttaagaagacgctgaagcttcaaaaaaaaacaaagttaggagataccgtacctgaccaggcgtgattggctgagaatccgccattatagtggatccacgaagggatcttcaatcaaaaactggaaacaaaaaagaagggaagagacagggagagtgatttctactccaccgtcggatctaaggtaaggcacaggatccgaaaccctagaaatacaatagcacggaaggtgcgagcaaagaagaagaagaagaagaagaagaagaagaagaagagatctgaagtgaagaaggtgttgcttcaaggatggagaaaatggcgggtgcgacgtcgttctcgtcaagctcacccaaacggttgttggttggtttggcgaatgttctcttttctggtccgttcggtttttttgcctttctctactaattttaagaatcggtgattacaataccaacagaaaaaaattgattactgaatgattaaataataactagagagagacgtaactattatagattcaaagtaattttaattgttagtgttaagtttcatatacattcaaaataaaacttcaaatttattttacaacaaattttactagacttgcactctccgagaaagtcacaggtgaatgtaaccaaattcatacctttccctcttcatctcctccaccaacaaatcaaataacgaaccggaatcttccctgccacactgtaaataatcgcttccggcaagaaattccattagctcaccctcgatctcaatccagctgcatcctggtgtcttaacgacgcctctgtctctcatcaacgccctcatcttcgcagactcatcccacatcttcatatcagctaaaacattagaagagattacatagtttcctgcgttcttcgcctctttcatctccatcaacatcctcatcgccttctctctgatcgcaacatcttttctcttatgacatgctccaaggatcgctgctaacatgatctcatcaggcttcccaggaaacctctccatgaactcccaagcctcgtctaacatccccgcacgagacaggagatcgattatgtttgtgtaatgctcgatttttgggaccaacccgaacatagaactcatctcatggaaatatcgacagccctgatggaccaaacccgcgtgcacacaagcagagagcactcctatgaatgttatatcacttggaggaactgacattcgatcaaacagcaaaagagcttctttagcgtgtccttgatgcgcataagcggttatcatagcgttccaagtggcttcgtttttcactggcatagcttcaaatactctcagagcttcctctacccgtccgcactttccatacatgtcgactagtcctgtggccacatagatattatgttgcaaggaaagttctgatgcatgggtctcaatttgtttgcctaattcaagagctccaactgaaccacaagcagacagaactgtagacaatgtgcccgcgtctggtgaaactccggttttttccatctcaaaaaacagtttaaaagcctcacttgacttcccattttgtgagtatctgataaagaacaaccaaaacagtccaaatttagcttcattaacgggtttaagaatcatacttttatctgaatacagtgtcgaacaatgacttacacagtgatcatagcagtccaagcaacacgatccttcttaatcatttgattgaaaacccttctggcagaatccaaatcaccacattttccatacatactgatcaacttagaccccagaaacgtgcttaacccgatcttcttggtgatggccatctcctccagcaatctaccagttctcaaatcacccaaatgtgagcaagcacccaacatactcaccaacgtcctctcatctggttcaaatccttcctcctccatcttcctaaacaaatccatagcatctttagcgtaacccgcctcagaatacccagagatcatcgagttccaagacaccgtatctctctcagtaatttcatcgaacaacttccgggcataacccacctgaccacatttcgcatacatcataatcagagaatgatttatatgaacgtctctttccaatccaactttgaacaacgacgagtggacagatctaccaactcctatctcctcaagcttcgcacaagcgatgaaaacaaaattataagtgaacttatcaggctttaacccagaaaacttcatccgtcgatacagagacagagcagcttcgtgatcattccatgtgttggtcaaccctcggatcatgtaattgaaagagtaatggtttggttcttccgtgacggagaagagaaaagaggagtaattgaagtctccaagttcgacggccttgggaatcagaaaattcggtttttcgacggagtgtaacaacatctgggcttgaatctgtcgcaattggttcacggagatacattttttcaacaggaaaagaaagtccctctcgagatcgccgcgtcgtgcttcttcaaattgtctaggtttgaatttaggaaattggcggtaaatcgagaacgctagtttctctggtttgatgagcatttgcaaactcataaagtcaaagagtacaaacaggaattaaaaatggtgcacaagtcagcctcggtttaggttaaaccagaaacaagaattggatttgactctttctaaacattatctatttcgggtcgacctgtgtcttttgctctccaaaaccatctgctgcaattcagcagtattcagcttaaaacaaatatacactaaataaactatgattttggtttagcaagttgctgaaaagcaaaatttgactttttgttcactttgttctcagtctgcttatttggttttggtaaagtaactataaaaggaagaaacctcattacaatctctcaaacacacaagaaggaaaaaaaaaaaaaaaatctctcaaacacataacttcaaacatcaatcaaagcttatacagaacttttttttctttctatttctcggacaaaaagaaaaatggatgacatatcagtgagcaaaagcaaccacggaaatgttgttgtgctcaacatcaaagcgtcttctcttgcagacacttctcttccttccaacaaacacgagtcatcgtccccgcctttgctctctgtccatttcttgcaaaaggtaagtttatctcagtccaaattgaggaagcactgctttattcactcttcaaagcttctttttaacccataggcttttcaagtttttgtgttaactgatacttacgatgagcacttttgatctgcagctcttagcggagctcgttggaacttactatctgatatttgctggctgtgccgccattgccgtgaatgctcaacacaaccatgtagtgactcttgtggggattgctgtggtttggggtatagtgataatggttcttgtttactgtctcggccacctctctgcacatttcaatcctgctgtcactcttgccttagcatcttcccaaagattccctctgaatcaagtcccggcctacataactgttcaagtcatcggatcaaccttggcatctgcgactctgcgtcttctgtttgatctgaacaatgatgtgtgcagcaagaaacatgatgtcttcctcgggtcatctccttctgggtctgatcttcaagcattcgtgatggagttcatcattaccggcttcctcatgttagtcgtctgtgccgtcacaaccaccaagagaactgtaagcgatcaacaaccaaaaacacttcatgatcagatgatatatataaatttcaatcttaacatttatcaatcttgcagacagaggaactagaggggctaatcattggggcaaccgtcacactgaatgttatatttgctgggtaagtttcacatttccccctcaatctctgcaagttaaaattcttcaatggtaagaatctttttggctaaccaatgggaacaatccaaactttcattttacagagaggtatcaggagcatcgatgaatccagccagaagcataggacctgcacttgtgtggggatgttacaaagggatttggatatacttgctggctccaacacttggtgccgtctctggggccttgattcataaaatgttaccgtcaatacagaacgcagagcctgagttctccaagacaggatcttctcataaacgagttaccgatcttcctctgtgatgatgtagatcaatctttaaggtcaagcatcttcaaatctgttcgctgctctcattgtaactaatcattatcaacacaaaatggttgtaaagtagaacatatgtatatgttactgtgtaaagtacactgtaaatcaaattaaaagtctgtatcattccgacttatgaaaacgattcaagaacgtaacttataagtctatttggacaatgcgactttaattagcagacaggatattacaatttcggttgaagaaagatattaaagttacagtaagtgtaagtaccgttacaacaactagtcaaccactgattcatctacttcccgcctgaccgtcaagatataagttgttgttgatagaatgtgttccatctctttgttgtgttctctgacctgttcttgggatgatcagaggtctgaagaaaactaaggcgaaaagtaattccataatgaacaaactcatgctgatccagacaaacaaagttttcctccagttccatatgatccttttcaagaaaggaagtttggattcaaggaacagagatgcatcgtaaatctcaggaatacctgctccaggacgaaactctgcacgttgttcgatcatgatcttcaagcaagcagtaggaataatgtccttttcgaccaagcctttaagcttcaagttcaaggtttggatttcagagacatagcccgtgacaagcggagcaatctttagcaaagtctggacaagacgtataggctcgctactaaattttaccatacacggccgccttgaactagcaagcacatgaccactcgcggataagaagtccacccgaacctgaaacatcccgagatttctattgtactcggactcaggcaatgtcattgacacagttatctctgtcctgtctttcaaccctttgaccttcccagtttcaatactctccttgccactcaaaccaaaggcaacaccagcacatgaacttatgggcacataagcttcaggactactcttggtgtaatcaaaattcaagctctctttgataacaagtggttcatgagccaaataggtaatcacaaaaccactaatcataaacgcagaaaccaacaaggcaaacaacatgatccccacataaacagcacaaaacaaaccccatgttactctacgcacaagctccaacacaggcttatcatcttttaaccctgaatcacataacccaacaatccacgatactaaatagcgtctaccacgcctcattgttcgatacggatcaaaaacaaagctcaaacatttactaattaaccatggaggaaaccttataaaggtaatcatcaaactaacttgaaattcaattgacctgatcactagactcgtcaaagaccaatccgtcgaagtatattccggtccggtataaatctcacctcgctcatcattcaaggtggtcactgtaaacgggtcgacccgacccgaatcattctcacccatattcttctccgtatcggtacacgagtcaattacttcaaagtcttctcctttttccgaaatcgagtcgattgagctatttgcagagtcagtaacatcgacatcaatttcaattgtttcgaaatccactagagaaacctcaagctcgtcattttctcccacggtgctccgtttctcacaagattccaatgaagacgtagaagaggaagaagaagaatccgtatccataggcaaccttcggcgacggagattcgcggggggagacgaattgaggcagtcgtagtggttcgagaagctatcgtaaaagaattcgtcttctgcgtctaggaatcgatcgcagctgctatgtgttgatgatgattctgattctgattccattgatcaaataaagaaaagcttcttcatatagcttaaaacaaagacaacgcaaacacagtctcccaaaaacagcttgataccgtcatgttgtcggcttaaacgacggttgttgcctcttcagttggtgggctttaactgggcctgatcttttagaggctcctcacatgagactccaaagtttcggtctaaaattgattttcttttctgcttcatggtttgtttgtttttctcttttactttccaggatttcttgctttatacgaaagggaattttgcagtgattagagacccaaagctagaaggaaagtagaaatagctgaggcagagagaatgatcaaagttgggaagatgcttcaaggagatactgagatagaacagagcatctcagaagtcagacactaataatgtatacggatatgacttgcacgtcaaggcaacgtcagagagacctcaacgttttcttcaggtcatgtctgttccatcgtctttttcatctgcttacgttatgtatccagttatttctgagtctactcttttagatagcagcctagtttcatctcctttcctgcaatttctttgaaatttattcgaacaaccccatctcagataagttatatcagaggacaacgatgttgacattcaaccatacatcgaatctaaaactgaaaaaaaaaaactctagtaaaatggcaagtcacaatgtgaaatgattcgagcattgaaacgttaagaaaccaatatataccaacgcgatgaactgggaaagaaacattcagtcatattctagaaatatgctaaaggacttaaaaggaaacaaaatctctaccaagctgagtaaaatcacgatttgaggttgaggagatgataggttcttcaccatagagcttaccagtaatctttgcaggagcagaccccgtttttgtaaaagtggtatttttttttatctcgctgtatcagtgctctgccggtgatcagtgagatcatcttaaatgtgttgtggccatcaatacaggttcgcatattttgtaaaacagttaatggtctccgagcctctgaattaatgatcgcgtgagcaaaggcaagcttgttgcttctaaaaagaagttgttcctctttttcctcttcttccactgttacaaaacaaacccgagtcgcagggacaaaacctatatctaacatttgcactttcaaactcctgaatgcagaaacggtccccagatgtgaagtatctcctgctctaaattcatgcatacgcttttttgggtcgtctctgatcatctgacaatatcgcaactcctttagtttctccattgcagagtctgatgcttttgctgctacaagacctgcatttgactctttgctcattcttgaggcatctagcttctttattaactcagcaaacctatccccaagctctaaatatccctgaacccaacaaagattcatcagtgtttcccacatttcaacactcggttccacagtcattctctcaacaaaatccaacgcctcatccaaatgaccacaagctgccaacatctcaattacattcacatagtcttccattgaaagaaccataccataatctctgtacatagactcaaaatgcaacaatccctcgttaatgtctcctatcgaaacacacgcaaagaaaacagctttgaatatctccttgtcgggtttattcccttcctctatgaaacgcgtgaacatatcaattgcgcgttcaccttctccattcttcgctaagcaccttatcattgtaccccaagtctctgagtttctcttaggcatttcgttgaacacattcaaagcgtcatcagtggatcgacaaccagaatacatttcgattaccgtgtggtaagatctagcatctaaaggagtgatgcagtcatgaacaaccctagcttcttccaaagcctctacttcaccacatagtttcgctaaccctaaaagcctgggaaaatccactatatatcccttatcctccaagatatcaataacttccaaggcttctcttatcttcacttgtttacacaaagcatcaaatgtctcaatcgtcacagattgatgattattaaccatctgagcataggaagagactcttctgcattgaacaaagctt

SEQ ID NO: 329 - DNA, 69817 bp, Arabidopsis thaliana
aagcttcgcagatatatccaatacgatcaagtgcagtacatattgccgccaaaatagcgcttccggccaccaattgatcagttagagcgattttgttgacgagagctacattttctccattcagggtgacagggatgcttaaatcagattcacatgtttctgaggatttaaccgaaaataatacccgctgcccagaaaggaggtcctgaagaagacaaaggagttcttccgaaaatccagaaagcataactccagcttcagtatcagccataactagaccagaaaattacaagttcaataaattaaaacataaaatcaaaagcagataaaatattagttttgagaagaaaaagaaaaagaaaagaaaaattattttggggcataccaccacgtatatgctttgagaaagaatccaagcaggagaaagaatcaacattcagagtattcccagtttttgttgtgtgaaccatggagaagttatgcagcaacaaggagaggaacacacaggccctttccctgaaaagaaaaaagggtatttgttagcgcctagacactagtttactgattgagttgaaaaaggaaatctatatcaccactatacactgaagaagcatcagaaagcagaatatcttactgggccaaaaggttttcttccattttcaaagaagacaaaatcgctggcactgcccactgttctttagtaactgacgggcaacgctgtagacaattgttagtagcatgaattattatgatgatactgttctggtcttcaatatttgaaaacacaataaagtgtttaagaagatgcccatgcaacggtttcaacatgggtggcatttcaactgtcactgagatattctgagtgttgagactaggagattcactagaaagtatggtctcacgtaaatacatgctattactggcagccaagtcaatagccctagcaggatttttgtcctcattcatgatctcacaacccaaaaaatctacctgaggaagatcaggggacagaagcgattctctagccatctggtaataattttcttcttccaagttatccaactctagcaacttcatataatctgtagcagcaaagtcctccgaaaataatgttttcacgtcatgtccagtagcagtagagagacacgtagttttcccagctatattacctggagtcttgcctgactggttgaactcaagagaattctgtacaattatcttcttcttacaagaaacccttcttttcttggaaactgtaatgtcaattgcggaggagccaccttgcctatcaggggggaccaaggtttcttccttttctgaaggcctagacccagttcctacaatcatggactgcaaggtgcccatcttctctccaatcggcaaatttttctttttatcaccagatgccagatgcttatgggacacaactgcctctaacattctttttcttttccgagagttctcatgaatatctctctgacacctttgaagatagttttctgccaccaaacagagatttccatttttactggtatcggagatcttttggagcatacttgattttgttggttggatattcggtttatcttttgctatttctgctgaagtagtaacagagaactgctctcttccctgtgatgccagtaactgcccatcagaaaaagatgttgcgctggaaattactccagaactcggtaattttctagagcctccagtaggagactccaattgagaaatagtacctgagacagactcactcacgccccgtccagatttagaaattaagtgggcagacaacttgcaagcctgctcctgataacctgagctggctaccaatttgcatcttgcgtcagaatgcttttcaccattacggttcttctgtgaatttagcgtcagcagtttcctgcatcctgtagcctgcatagcaataagatgagcataaggagactaaaaaggaattaaaataatcaaaaacagcaacgtataaaagtggtatgatgctgtaaataaaccatgttaagataaaggtcactattccaaatattaaaacatttttttgggttgtcatcttctatagtcagattcaccttctatgtatcaaatttcataacatgtctatggtcatcaagccaattttcaaataacgataaggagacaaagtgtacaaaaactatggcagaaacaaacctttccaaggccagctgtaccttcaacgtctgttgaaaaatactcatccagtagattcatgcgattcgtaagactaccgaactccagtttcaaccgacctagctcttcgcactgaaattcccttcgaaacttttcaaatttagccactgtttgggagtgttttgcacaatttctctcaaacttcatcttttttttcaaaagcctcatttcagccttttccaggtctctgactttctgaggagaaatagagtgagtcttgatggatttctgggaaagtgaaagctcatgcacttgtttcttcaaaccttcagcgactaattgcgcttcttgtaactgttgagtcagatcatcagtacgagatttccagtccatggctgtttttttattcatctcaaggagccttatcttctcttccagcttttccgagttttcagcaaacttcacttggctactagcggtctgcgattccatttctttcttgagctcttcatttcttgctctaacgatttcaaacttcttagacacatcttctgccagcttcatctggtccctagcttttgcactctccatatctgcacgttttttctctttcagtgtcttctgtttttcaagctcaagctgcttttttacagtctcaagattggaggtcaaagtaagtaaatcagaactagtcttatgagctgaatttcttaacacctccaactccgaaagatacttatcagctttctttttctctgattctgctttcttcctctctgactctgtcttctgtctctcactagcaagaagatttttaaccagacttatttccctttttacttcaggaatatcttgctcgatttcctcatcttttactatcagagcctttgccttgttcagttccttaaaagcatgttccctctcttcttcagaactatctgcccttaatgtttctttcttaaggagatccctcagttcattgatctccttttctcgaccagaagcttgatcctgaagaagctttgtttcttcacttttttctttaaggttccgctccagtttttgttgcaaagacactatctcaaacttcaaacgagatatttctttctccaaagatgctttcacagttgaaccattttccttagtatctccgtcagtcgccatctccccaaattctgtaggattcagcagatagaccagtaaaaaaatcaaaattaagatttggaactgtagtaacaacaacatctttccaaccaagccacaaagcccagttttaaagcataccataattcaatcataatcgccaaagaatcatcaattggagaattagctacatcaaatcaaaggcataacaatggatcatgtaccataaacaaaattaatcagtaacagaaacacaacacatcaaaagggagcgagctaatctctgccacaaggagtaaaaggaacttacttctctcgagattggatttttcagcattaacattttctatagccttctggagaagagttactccttctttaaaagcatctcgcctcttcttcattcctatgtacttcccttgccactgaaatacaatcaaaggaagacgagaataagatttctttgaagaaaagcactaaacaacataaatggacaaaaatcgaatacatacagcgaggcagcaagggtttcctgaagctagctcaggtggagcattggtcgtcgccattgccaggaaaattattccgattgtggaataaaatctcacataaattgaaaattcatcgccatgagagtgagggggagaaactaatagagaacgaaaatcaaaaaccctaaaccctaattttcagtgagcagaagaaagaaggaagagtgcagtcagtttgagaagaaggaatcgaggaggagtcagattagacctcgagcgatttggatttccgggcgggtcggtgagtgagtgttgattttatttctttacccaggcccagcccaataacgattttttttaatttttagtttctcttcccatatttggttgtcttttttaaacttcggatatttattgcaaaatgtctgtcaattcaagaaatatatatatggccaaagtcaagacacagatgttcatgttagtagattttttattgctttcgcagaaaaatattatattaggattgtgaagtattgatttacaaactacaaaagacagtgatccaaatgaaacctcagattaaacatctcaaaattcagaaggatgattaataacttaagattaaattaaatgtattacaaacatctttttagtttttgccttttactactattgctcttttctgggggcttttgtggtgggaagtgtcccaaagactatgtcccataacgacgaagttataccaaatcctttgtcctgaatcctgaagtgatgattcaaatggtacttctgcagaatcataagaaaaaacataacaaataagctctctttatgcaatccggatacaaaagaaaagaaagtcccaggttttgagacttgacattgttttaccttgagatttttggtcactggtctagtaggttgggcatggtgaaggtaataatgagtgacatcgtacatcacatatccgagcatgcctccaccaaacaatgcaggtgcggttgaaggagttgagatagccttcgcaatgttccagaactaggacacaagaaaagaaaacggtttagggttggcgctgaaaacatgtagaatggtgggttaatgtagataaataccggaaagcataaaatcgctgttgcagtaggaggaaagacgagccgaaggtggtccatcgggtgcttatgatggcatccgtgaataagatagtgtgcagtgtttcccctggagtggtttcacaaaatcattagcatctgaccgaagtcatgtttccaggaatttgtctgtttgaggaggattcataggagagtactgtctctatgaaatgtaacacagagagagggagaaagtgactaaccagtaactcttcgtttttatgtggaaaacgaaccggtgaagaacgtattcaaaaaatgtccagatgaatattcccatgacaacaattgggacgatttctggaagtgaacatcccatacttactgaccttgatatgcaccagactacaactggcaaccaaatgacaggaactgcccaccaaactgtaagtgtcaagaactgtttcattgcaaatacgtcagagaatggagatcagagtctcattgacattgcttattattgatattggaaattgagaatgagaaaagatgaaaataaaatatatacctcccaaaagtcactctgaaaaaaccgagggccttccttggtcgcgataggttggtgaacccattcctcataatcttctccaagatgaccaacctgtaaaacatccaaagcaatggcaggaggggttaaagagagagcgttactttgattagctctaagaaagaaacgaagacaatcttgggtgactatggtctcaaggaaaatgttgacataaactatttaaaaccctgggaaacagtaattacctgaaatacaaggggctttttaagatccacagtgaatccctgagcaaccattttgcagaccttttactgattttgaaaaaaaatgaaacagacgatcaagagaagaatatgatccaactatgtctatattgatcagaaacgcatagtaacaaacaccagaggtccttttcaacaggtcgtataggtaaatttacagatcctcttcactatcataaccagattagaggcctgaatcttaagcattacttcttaaatgactaagaaaacgacaggggtctactgtttggcaagataaccaacctaattgctcttaatattaataccaaactcacttatccaattatatatactcgataaattagtcccaaaaatcgaaattcctagcacaaaaagcaagtattagatgaaagaaaaatactaatcatttaaaaacatagaatgtatgaacagagctccctctcactcatttccctccaggacccaccaccaaatatatatacaagtaaactacccaaataaatcaactcacaagttaacatcaaggaaacaaaaaaacacacagttcctaattgagttgagacacataatctattaaagagaaaaatggcttaaccaaaagttcttttcaattgaatcattcactattgttgcagtgagaaacaatgaggctcaaaaaataaattcacatgttttcgagacaccttcctttctagcaacaattgagcattttttatttagccttcaataacaatgcgtaaacaaagttttaagatagttatgattcgttttttgagagtcaataacaaaaattatccgatctaaaccactaaacatcaaatcaatggaaatctcaatgtttccagaaaaatgaaatctatctagagaggaaaggaaacaaatacggattcaagagaatagattcgaatagaaacgaacctgatggatctcagcgactcgagacggaagagagaatcgccgagattgtgaatgaatcgccccggccctgttttggaggtttgcgttggtgtgtgtgtgagaattagatagagaaaacaaggtcggtgtaatatatcttctagatggaatctggaccgttgattgtgagagatgccttagatctcggaggccaacgaatcgtcaatatattcaaaaaaaacaacggctgtgccaggttgttgctcttttggctctcttcatacattagctgttcatagcctcgtcttgtcacttgtcgtcgcacttataggattcccaattttgtacgttgccacaaataaacaacattacactatatatattacaaattcaacttatatggaaaagaaaaaaaatactaggatactcatacactgtgtggacgattacattttagacttcgaattattggtcttctgccaacaatgtcaaaagattttattgactgctttaatcattttccatagagcaatgagaaagtcaaggattaaagtcggtctcttcttgagtaaatattaaattcgaagattgtggcagctagataataatcatactttcgattttcttattgagtaaaataaaatttgtaaatgattaattcattatgcttatttttaggattttgatgcggcctcttatgatgtagaatcattcactaccagtacacgtgaccagtgtcaagcatagtgtttgattataattattttatttgctttagtactatagaatgtttctttaatgcttaaaatccacgattaatatagctcactcgacgacgctggtgtgatgacaattgattagtctttgtcttttatgtctaacttagagatttgacaacggagcttaaatagtcagcataatgaaacagaagatagaaatgaaagtagtagtgatacggttaatcaaatgtttggttagcactttttccagaaaaatgggttggttccatttcacaaatgtaaaagaagtaagatattggttatatcagcctgatgttgagataagctttcttgcattggtacacagaagaaggaatggacgagatggagtttaatgaagcagagagtaacatgaacgatcttgtggctgagtatcagcaatatcaagatgctacagctgatgaagaggagtataaagaggagatggatgaagatgctgacctcgatgcttgagatttttagatctttaaatggagttgttttcttttcgtatccgctggctttgattgctcttttgtctgttgttttgggtgtaaaaattgtaatgagaaactaatttgtatgtgtgttggccctaatcttttctcgttttggtttatatatatctggtttggtcttatttagttatggttatgtgagcaatcaaagtagaccaattaaccaaaaataatgtctatagttcacttacttaaattaagtaaaaatttgtgtttgtcacacgacagaaacatagaaaacaaaatttgatgtaatgacgacaatagtgaagaaaaaaaaagatggaattaaagaaataggaaaaagtaagtgtgaaccctaaacgtctcctattatttatcgattatcgccgtctttcatcagaatctgctccttctctatttttcttctccaagaaaaaaccatagcgaaggagtaaaaaacgaaggccggaattatcagaacgggacagtgacaagggtttccctgagctgacggaccctttcaattattcatcctcgtgagttctctcaccgtcgtattttgtgtctttatactagttttctcttgtaaaatctgtaatcaatggagattttacttggttacatcgattcttatagctctcctttccctattttcgcagctgatagtctatatagcttcaatacttaacatttagtctaaattcagagacttttccagatattgtttctagtgagtttaaattgagtgtttatggtgtcttgagtataagttaatgttgaaagttttgagatttcttaatacttctcttgtccatcaggaaagttccacactttcggcaacttgaagtagcagcacgatttacattaagtccagagaggatgggagcagtagagcttatgagtgatccatcgagcttatgcacagtcgagaactatgtggacaacgttgatttatctgatacgcaattggtgcagaccgtgagaaaggctcttacatctgtcaaaactgtgagtgttgtgcaagttttgcttcttcctctgcttatgtgtttacagttatatatatttgatgctatattatctgttatgcttcttgatactagttttattaattctttgctaatgacagggggactcagacctttatagtgagatggttggagttatggcacgggacatcaaagaatttaaggatcctgatgtagtggcgcagcttgaggtgtgatctattctttgtatggcaatcaattctttcttatttgttctttttctgtttgctaaagtgttttcatttttcaattgaactggcagacagtcttgaaagctctatcaggcgctgtggcttgcatagatgtccttcaccatcaaaagcttctttctgcggtaagtttctattgcacgagcttacaattgcttccaatttaaatagttttaagatggatcctcccaaatcttaccctggatttcatcccaattgttatgtctagctttttcgaatgaaattgtgggaccacagacctgatgtcatggatgcattggtgaaccttgtcatatcactggtacacaactcaacatttacccgcctattgttattagtctagatgaagagctagaccatttaacttttgccttttttccatcgcaggctgtcactagtggaaagtatttagactcttgtctgaatatgctcgtaagcaacttcgttccacctccttgggtagtgaataacctttcgcactcccgtatactaaacaagaagatagacgttctttctcgggtgcatgcagcgcttctgaaaatctctattttggttcctcttactccctcaagattagtgccaatgctcttccagcaaatgcccaagatgcacaaaaaggaccatgtgagtctttctttttggtaaattttggacaatttagttgtaagctcatactggcgataaactcatacgaaactatcttaccgccttgcagtcgatagtgatatatgtggagagcttattaaaattggagaatagctcaatagggcaagttggtggcagcatgattcttggtatggtgatggagaggctgcgagatttggatgtaagtagacagaatatgcttatacaattgaggtcagtaagtaatgtggtattggtgagtgaatgatatgctggtgtatccttgtagttagagattgaatgggatgatattccacaagatgactctagtagaggaatgtttgatatggaacttgaagatgcagctgaaggcactatgaatgatggagacgaggtagactttatgtttatgtttccttttggtatcagttaaaagttgctagataacaagttagttggaacattctttttgctgaactacgaaagtttggacttgatttatctattgcagcttccagtgggacctctaaagcaggatacatcagatggaagtatagtctctaagttgttggacaaattgatggtcgtagcttttgagcatcttgaatcctgtcaaaatgatggtcgtttggatcaggtatggcaccaaatgggacctcattgacatatgcatctatactttccttaatgatggactcgagaatcttcttagcacttctgattttttttaattattttggcgtaggtgtttgaaagcctcttcaagtcatttgaaaacttcattctgaacacatacaaatcaaaattcacccaggtagtccatatagctatcatattttgcataattatgtacatattcttctagactctagcatggtcgacatgaaatgtctcggtttatactcactttctatatcatctgcagtttctgatattctatgcctgctcactggatcctgaaaattgtggtgtgaaatttgctagtaagctagtggagatttttctctccagcaacaagcatgtagctactaggcaagcatcccttcggtttaaattttctcgttcgctgcatgatatgttctgtcattgttctaatcacaaacttggttgtgcttttgtctctcccccttaacagaatgagtgcggtggcttatcttgctagcttcttggctcgtggaaagtttttgcctgtttcctttgtggctagcatgttgaaaaggtggaagcgatttctacaaaatgtcacctcaaacataatcattttatctgattgaagcttcagtttgttgtaacttgtaacattgtttttgttgtgtccaaaaattttaggttgatagatgagtgtgtgggttactgcagaacttgcaatgatgatactaggcctgaagcacatcagattttcttctccggatgtcaggtatatatagcattcaagcccaggcccctgctgtcacaaaattctacaatcactctgttgctatttcatcctcgaaaatattttttttacctgtccttgagagttttaagtttcaaagagtcattccaaaatgtagttacattattttaaactgtcatttgaatctgttctgtgaccacaggcaatcatgtatgtgctctgcttcaggatgagatccatcttggatgttcctcgctttcggtcccagcttacaccattggagtcaatattaatgcacaaactaaacccattgatggtgagttatcttttcgtcacataaggtcaactgttatatggaagtgtgccaatgtatcaaatgcatgataagcgaattctgctttgagaataggtatgccttccatcggtagttgcggagttccttagacaagctaaagaaggtggtctgttcatcgtctcagactcgttcattttcgatgacctacttgagtctgagctttcccgtgcttttggcgggtttgagaggctggatacattcttcccatttgacccttgcttgctaaaatcctcaaacaggttcatctctatctttaaaccattgcaccgattcttttacaggaatcttaattgaaagtcttgactctgtttctgcattttcttgggtgatgttgtagctttatctccccaaatttcatctactggtcaatggtcaaagcgacctatgacgaagatgatgatgataatgatgctgaggtgatcgtgaatggagatgaggacagtgacgaagatgacgaggctgatcttgattacgccctgaacaagatgtccataacgcctaagcactctttcaagaacaagatggaaagagacagacttttaagaatgccttccaggatcagaccgtcaacgagtcctgaatccttgtgattctactatacacatttttgtagcaatatgtaacagtgattcgactgagaacatattattgtatgaaacaatgtttgttttcctttcaaaaaactgcttaatatgtggttcacctaatgaaacattaaagatacttgaatcatttaatcgatccattgaaggaaagaaacaacaacacaagagatatcatctttacttcctctagccaaggctttatcaattagcattttcgcagcttcttctgcattccctctctttttgatttgatcccaaacctcgtcgttcgacatcacctgacaaagaaaccaatcaagatttagtcctatctttgggtgcaccaattaataacgtcccatggcattcatatgtagaaaccttccagagtccatcgctagccaagatcaagaactttgtgtcatcgtggatctcggcaatctctatgttcgggatcacacttatatgctctttaaggcctccgtctccaaacgcacgcgtcatcgctagttgtccatccactctcggaacattgcctaatcattataagtaacatgggtttattggctttgccttggaagtccgaaatagatcattttctcttttcttcttagtaaaagatacaaaagaagggacctggcttttgggagacaaagccgcctttgctcttgacaagatctctctctttgtcaggttcgtgatcaaccgtaatttgtttgactacatcactttcacgacacaagattgctcttgaatctccaacgtttgcaaccacaattttcttcccatcaattactatagccgtcacagccgtggagccacctcgtggaccaaccacgttttgaagaatgtagtcgtccgtagatttatacgctcttttgattgccttcttagggtttctccaaaaatccggcttcatgaaacaacaacaacaaagtctttaaattctgtgagaaattcttgagaggggaatgagtgagtttttgtttctaaaacctgactcaagatgttatcaaagagatggttctgcagataatccgcaacatcactgcctgagtggccgtcgaatatagcgtataacccaagattgtggcctttaacggttttggtgtcagccacgatgaagtcttccatgccatgacccatttggcctttcactagatggtatccatgatcaaattcacgtctacaatatcttccattttcctcctcatcgtcatcattatcatcaacatcatgatcatgatcacaaccatcatcaataacaacaacattatcatcatgaggtatttcttcttctacacgtaagtaatcctctccttcctggtttgattcatcaagtcaaagatcatagatagatagatagatcacaaaagatgaagagatggggtaccttgagtttcactgcattcttgacatctccactagctgatcttcgcttctgagtaaagaagagagtttagaccataatgttttacgtaaatacaagttatacttcactataacaccttattttgatggttcaaatcaatcattgattaccttgattgcatgcacaagtatatcctcgggtctatgagttgagttctgcaagtaagtatcaataaactaaattacgaactaaccaaaataaacttagtttgtttgaaccacaaaaaagtcacgagacataattctagtattgaagaaaaaagccaaagaaagaaccttgatggtcttcttcattatattgcttgatatgagtttttccttgtgctgtcttagacaaagactgaagaagaaggatcatgaaatgtttggagctcttaaatcattactattgcaagcttattggagcggtgctatgatgctgtcatcgacacgtcagctccacaaatcacgccttcaatatgccaacacatgtctgcggccgcaacctgtgtcctctgtctaggagattttacggcgggcgattcggtttatctaaaccgtcccgaacatttggtgaatcaaaaccgtaccaagcaagactaagttagaccatcattattgatggttgcttagtctagtcttaggttagttcttaagaatatatatataattgattttgaaaattttgatgttaagagtttagttaagagattgaaattttagtaatatgcaattgtggaaacttagcttgaagttcttaagaagaaaaaaaaatatttaaaaaaaaaatattttaattttaaaaaacttaataattattacaacttatatacatacatgacattacaaaacacacaaattttgatagtttaacatagatgattaacaaattgaaaggcttatcattcataaagactaaccaaaatcttgttttcaatgccttatgggcatataactttttaaaaaagaaatggttgatagtttaacatagatgatataaaaaataagaacaaaatggtttacttattgacatttctaattcatttgtgagattgaaatttgaattgattttttgctccttcaatatttaatatttatcattcagccaatcaacaatagacacttgtctaactcttaacccttagttttgatgctcttatgaagagattcaccgagaaatgttgtttcattctcaagagagatgttccccatgtcaagttctagtatcttcaaaacttgcttggttttatgaatcttttggtttaaacaaggaatcagataatcaaattcgcgaatctcctttaccacaatgatctaaccagtaacgattttggatcacttgcagtaaatttggtagatcagattcaagttcaatatgtttgaatttagtcataactcataagatgttgtttctcacgtctgtatgtaacccaactgtattctaagattgaaagatccggtgatcaaacattcagttgatgacagtacatttatcaaaacctacctactgaacaaaactaaacatcaacagcattaaataagcctgagagatctgtacagaaagaaacagaaataaactagtgtgaaagagatccgacttatcaacccgatggtctctttgattctccgctaagttctctccggacaagcctcaaaatctcaatgatctgcaaagtaatcagtatggtctcatcattaaaatcaatctcaaaatggaaagaaaaatgaaatatgtgtagaccgagatcgtgcttacgccagggtaatgctttaggattggagagtaatgatcgagagcgatatatattttctcaagaagatccaaaagagtttcaacctcatctccaagaagatcaacctgttaacaacaaccatctaaacatcactttttaaatccaataacagttaattcttctactaaataagggtaaggacacaattcgcaaacgcctgttaatgtaacaagcttataaaaataaaatacgaattcgatggataggggcaatcatgtcttacctcagcctcagccttcttgaggtcacaacacttcttctccagccgttgcttgtacgtagatgctttccccttgacttcattgatctgatgtgacagatcactcagttgactctgcatgtttttcaacctaagatccaagaaagttatcatacaattattatcttcatgctgttgaaccaagggataaatacttgtatttccatgtataaaggtagagaaagaaaaaaaaaagtacctagaattcgttttttgcgtcttttctgctatcaaaccctctagaatgtcgaacccttttatcaattgaggaggaacgactaagtccagagacacaagttgcttcttaagtgtctctttctctgcttttgtctctgataacttttcctcggttttccttttttcatctttcatttccttcaaactctctcttgctagttccaactcttctctcaagctggatatcttcgtctcataaccttttactttctctaactcgcgtgccgaaacaacgctcagtgcttctatcttatcctgaatttctgtttcttgccgttccacctgagattgcagatcgttaatctgttgagagactacctcaattttctttctctctgtagccaagttattctcagctgtttggactaaattctccttctccttaacaagacaacccagcctatgaatctcctctttcagtctttccttgtcaaccatctctgatcttagagtaccttctttttctgttacatgcaagttcaactcaacaattttcttatgagcttccttcacggcttctttatatatgactgaacaacactcttccatcatgacggacttgacacaagagtcttcaaaatcctccttgcttttacgagcttctttcctcgcaagatcttccaataacaattcatatgcttctctcaacatactatgctctaaatctgtctcctgttttgtacatttaatctggcccacaaactccgtcacaaaacacccataaacatcttcgtaaatagaagcttcattacgagaatcctcaacatctgtttcgagctttcgaatcaactcttgatgatctgcctcagcctgagagagctgtgacatcttctcagcagcgtctgaaagtgaatctttcagttgacgattttccagaagaagagaatccagttggcgctttaaaccagcatcattcttgccttcagacacaaacttttcatcttccatcaaaattttatccaatttagagatgacaaatgggatcttctttttcagcgcccctagctccttatccttccccacaaaagaaaaagaacccctttccgttaaattcagatacttgcgcttaaaggtaaagcattgctctgtcaactcttgtattttataatcatggtctcttttcattttattcatctcgatcttaaagtgattgatcatctcatcaggagacatgtgtcttaaggtctcgttatgctcaggtattaagccagtagaactctcttcatgcttaccattttcccaaactgaagaaactgaattaaggcttcctgacatcttgcggtgtaattgctccactcttttccgatcccctacctctcctgcctcgtccccgttttcatgatccaaaaacgatttacgaatcgcctctagttcctggcgcagaccagtaatctctttgatatttccaagtatgagacttctattaccaccaaattcagctttttggtccaacaatctctgttcatactcatccttgagactccgaagaacactagtaaccactgcagactcaatttctttttgaaaatcatgctcctgctgccacgaggagggaagttccatatcattcttccgcttcaacacagtctctagaatgctcttcaaagaatcaagcattttatcgacagttttggacctggtctcatgcggactgctgtctaaacccaatgaatcatccacagtggcacctgatccattgatgtgaatatactctctcaaattggtgagttcttcaacgagcatcaacaactgtttcctcgctttctttttaagactgctcgaagatccttgagtaagttcatcatgaatcaaacgggactcagaggattcattctcttcagaaccaacatggtacagaagcaaagtctccctaatctttgacaattcaagatctttctgagctatcttctcagcagcatcagactcaatagcagttaccattccccttataatcgaatcactcaccactcgtgagatagttaacctatcatttatgtcctcccagtaagaatctaaatcctcaagaaaatcaacatccggattctcgttctctttaagaacaccattaacctggagtgatgatgataaagtgtcatcatgaaactctaaactaccattctcagacttcacgacctcttcctccataaggttattaactaattccaccactcttttctcacaataaccctgtgagagaaacaacagtgttcaataaaaatcaaaactttacaacaaaatttactccttaattaagctatcccagctaatgaattgagattacaaatcctataagaaaactctaacgaccatgaccaaataaaaggagaagcaaacttacaagtcgaggtaaagtgacgaattgaccttaagaagagctaatcacagcgtcgatttcaaggatgagactttcttcttgttcttgcagagttttagggtttccaaagaaaacgcatagtaaagggagagaaagtttaagaggcgctacgctacacctgagcggagcgggagactcgagaacaaagcttatgcccagctcctttacccttgaatttacgatattacccctattaattttgtcttttgtcattatacctttttgagaaaatacaatgtacatgtgtatgtatattatgtgtttggctctatcttaaactatatcattatttcggctaacatttgttgacgagacttattttttcatgcaaagatgttcacatttatatataatataagtagcctgttcaaatgggtcaagctcaatccaacaaattcagtttttcatggatttatttattgttttctgggttggaaagagcttattcattcgttaattttagttcaatacttcaattcattagggttattcatacttatatgactaaaataagggaattataatatttcttttatggatatactagaatgtgttgctaagacaataataattggaaagaattcattgagttgatctcataatcattaaggtttctacctaattcaaaatcattgtttagtccaatccaactaatccgatgattaaattaatccggattctttttaaagaactaataaaagatcggagcctctgttttagaagtcttaactttttggtctattacttttcatagctttattcttcggtcaagatgtcattcttggaacaagaaaaatgtttatatgactaatatggttgtgacattcgattaattaattatagatttcggatgacattttaattttttagtatttctattctagatatatttttggtaataaagctagatttgacaatatgattgatgttaaatttaagatttatatgacaactataacaagaggtatttctaaatctaagttttacttaatttttctctataatctatttgaatcaatatacttttgaacaccccttcgataaaaattagtatatttatcttcacaattataaaagaatctcatccttatctttctatcaaatttatgaatttggtctcatctctatctttttcttttgcttttactttgtgtaagtggtattttttttttttttttgtatcatggattaaactagattatgacggtttgatcttgatggttggggtttaagtcttattaactaaaatcgttcttttgaggcgatctttgtaggaaaaaccaaactaggatagatttgtgctcaaatgaactaacatagaaatctaaaactgaaaataagagacctcattaagcttattgcacaaaacaaaagtatgaggggaaaagatttagattgtccccaagaatagaatgactttagttttgatttcaaagaaggggatagactatggagttaagtgacaactctctacgttagtctcactgttctcactacatgattatatataagagactacttgctcatctacttaacctaattacatgaacttgtgttgggtttttccaatatcatgaacttataatctttggttttgttaggaatgctcttttaatctcagtgctaaattatgcttgatatttataactttttttttttttttttatatttataactttatacgtgctgacatgcacttgaggactttgaggtgtcgaatcaagaatcatgatgataaggagtttagggatgaaagcagactatataatcgtataggtgattaagtaagcatggttatttaatgactgctcagtcacttcatttacttgtgtattaatcatgtttactagttagttttcgtccatttccaaacgctaatttgttgttcaatgactgctcactcacttcatttacgttaaacgtttcttacttgtcgaatgcatacttacttgattttgacctatagttacttgtcgaatactgtgacctcgtataagtgatcaaaggcgttacaacttttggtggtcttttacacataagtgatagttttcaattatttttcgagtcaaagcaattagcaaatacttttttaggaaagttttttttttctttttttttttttgggcaaaatttttaggaaacttataaataataagttacttattatggaatcatgtactgtttttttctgaagtcactcatcactcgttcgtttaagtaggttttgttttgtcactgaaccgaagtcaaaccaatctaaataccaaagctggtttaatgtctctgaaattcgaacaaaaccaaaagcgaacggaatcttcggtttcgataccgacgcttctttgatgactcacaacgaaagatatatttgagggcaacgggcacaagtagggtcaggcaaaactagtggagttgaacaatcgataacatattcgggcagcttttcagatctgcccgtcttttcctacaatctcgatcgttgtttcgacacttgtcctcattgtattagcctccttttcactgttgcacatcgtgtcgtttaccactcctacacattttcgtggttctgagttgacctatcactacagtgtgagtggaaaacatgaaaacggcacgatgttaatgaatattagagaaggacggaggctatgaactgaaaaaacgacatggtgtgtccctcttgggtctagccgtttaggcctctgttagtcatttcgtctcttccttagttagaacaaaaaaggagagacctttaacaattttctgagggtaagatccagagattgattgaatcagcttactattttatataattcaggtaaattcttatgtttctttccctccagattttgaaagtttctagcttttgttgttctgtatctactcgtttccgggaaaatgcttttgctatgtatgttgagatgtgatagtagaggttaagattggtttttctctgttctgggtttgctttagattctagggttgtgattgaattctgattttggggttttggtttagtgaattccgattctcaaactcttggctttggtactgacttttgtgctttgttgttgtttcagtttgttgttcctcagacttgtaactaggacagtcttctcatgaatcatgacttcttcagtacatgagctctctggttttgtctctctttctgaccattttcattatgctctcgttttattgttgtatcttcctaactgattcttggtggtatgttttgctggtcagataacaatgaaagtcatgcgaagaaagaacgtccagattcccaaacccgaccacaggttccttcaggacgaagttcggaatctattgatacaaactctgtctactcagagcccatggtaatttctctcagccaaaatctcaactatttgtgcaggctacattcaatgagtgatctttatttcgattatatgatatttggtttagtttctgtgtgatcttgctctcggttataatatgtttgcttgtgattctctttttcaatgctaaaagttttgttttgatgcttacaatgccaaaacttggttgtttgagataattcaagcaagaaagtcccgggatcatcgcctttctgcagttttagacttcgtacgaatgtaaactttgattgctttgaaaatcagtcttgagatgcagtgtaatgataatgttgattccaagtaatgctaaactttttaacctgagatgatacggtttttgtttttgtgtgtgttggtattgaaggcacatggattatacccgtatccagatccttactacagaagcgtctttgcacagcaagcgtatcttccacatccctatcctggggtatgtattatttattactcagccccaacgtctccggtttggaatatttagaaaagcttttgttttatttttaaagtttttttttcaggtccaattgcagttaatgggaatgcagcagccaggagttccattgcaatgtgatgcagtcgaggaacctgtttttgttaacgcaaagcaataccatggtatactcaggcgcaggcaatcccgggcaaaacttgaggcacgaaatagagccatcaaagcaaaaaaggtaaaatcctggcgggcaagtgctgtaatttgtttggtagaatccttcccaataagttgtaatttcttgttttcagccatacatgcatgaatctcggcatttacatgcgataagacggccaagaggatgtggtggccggtttctcaatgccaagaaggaaaatggagaccacaaggaggaggaggaggcaacctctgatgagaacacttcagaagcaagttccagcctcaggtccgagaaattagctatggctacttctggtcctaatggtagatcttgaggaaggtttctgcacaaccacaagtttagtttctattttgggtggatgttctcagggcatcatcgtctttagtgtttttggatacgctgtgtacaggttatttgctagggtaaactttgttttagcgattagaaataaaactaagcaaagaaatgaaaagtgtgattggaagtattgttgtaccaaattgatattctttgccaatgaactcatgttttggaaagtaaattaatgttcttagctttgtttgctatgattttgaggataactaacactgatgataactaccactgtggattagtccattgttagactagactgtttattggtattcttctatatatatgaaatgcattctacaggatcggatttgacgttgtaatttaggagacaagtaaaacaagaattcttccgatctcataatgtggtcaatcactaggctcgttttcatttttaatgaacacattgcatgcatatccgaccatatgctcttccgatgatacattttgaatgacacgacatacattattttacaatcacaattctctttttatacgaggtattgtttcttttctcgacttgtagctctgttttagttttgtcaagtctttagacctgtttacaccattttattattatcttctttaccacatataaacttagcctttttcttatattcacaaagagaccatatttcaccattccattgatgatatattggttagatgtgttgggatagaatttgaaacattgatttctgcgaccaaatggattcgttttgggaagaaggtagaataatcttagtttaccacttttttttatccactaagcataatcatttcactcccagacagtttatatttctgaagtcatgttttgttctcttgcgccttttctgtttatttatatatttggatttaataagattccataaaagcattgctttgattttcagacagcttctggctgaagttttggttgttggcttattgcgctttagctactgtctctctggagtttagacagttgatgtgagtttatcaaatacttattaaaacaaagtacatgtgtttccttctctagtctctgtatatgatggaaaattgggaaatgaaaattatataaagaatctttgtcaaataagatattatgtcaaatatcattcggttattcttcaaatttagaaaaagcaaccaagtaatatttttatgaagagataccagtgaaccatataaattaaaaccttgaatatgaatttatctgaattccttagtactttcattaaaaaatcctaagatgtatacttatatattaaataataggacataaataacaatatattattggagtgtttccaaatgttgactgcatcaaaagttctttgcattgtgggttaggtcacatacacatgaattggtgttcatgtgtgtgtatgtggagatgcataactcaaatcatagggaatgattgcatgaaagtttcattggaaaagagagcaaaatataatggatttttcatcttcttcatgggttgtatagtgtgggttctattatatgaaaggtcgactatgttcctttagctatacagaaccgcaggttgacgcccagataaaattaaaagaaaaaccaaaatgaaatgaactcttttgatggatcattagatcatatatatatactgatcatcatattcacaccataatcaactatagttaatttggtaacgggtccattatttgattgaaatattataatcttttgggtaaaggatcaattattttgattgaaaacgatcctcttcttcagaatcaaacgcgatgttgtcgtcatatgacgtagtgaaaaaaatgtatatttgtggaacgtcttttataagctcaattgttaaggtcatggcgagtgatatctacaaactttaatcccactcataattattaaattatattattatatgatcaaaaacaatatatgcatgagcagcctatcaaacttggagccttcgtttttatccatgcctgactttacacctctatcattcccatgcatgggtcccttcctccacctctgttgctctctctctttttaacacaatagaaacaagagatagcgagaaagagatgtgagattgaagcaaaggaagaagaacacaattgtgacaaaaatagggcttttctatttgactttttttttttttttttcactttcatttcattccaaagagtggaataaaaagacacttgtgcttttcccttccattgagtatgtgatctcaatatcattgctgcatcgatttcccatttatggagtaaactcatgttttgtttttgtatttatatatacggagaaaaagcaaatcctaagtaattataataaagtttgattaggtattatcatggatgctttcttttggtattaggattagttttctagactacataataagaatttcaactgaaaacgtttgtagactctagtcttaatccatgtaaatttttaataattatagagtagacatgttcaacgaaaactgatctctgatttcgatctaactctaaccaaccattgtatactttgcaacttatgtaagattcatgagattgtgttggtaatactatgtagagtgattgaacttcataatggtacgatcaccttgactttcatatatataattccactcaatgttatctgttcacaatatatgtaaagtttggccagtccataagggctgtgaaataagtttcagtccaatgaattgatcataataacaattgattagttgaatccaaatgagactttagactgcactcattgtgcatcgcttatcttaattagtgttcaaacctaggtgtcaggaaattaggtttttaaatggtggtatggttaggacgtccaaataggcaaatacttgagaaatgaaactttaaattaaaattcctgattcacatatgaaacgagataaaagcgtggatctatacgcaaatttatatctatatcacatatattatgtggagctccaaaaagaagtataccaatggcggaaaatgacaccaacaagaagaaagaaaaagaaaaaagcattgtaaattttgggaaatcaagcaatgtacaatgtagtgtgtgacatgggaacaagagtaagtggacttggcccagtggggtactctcttgctccatgcctcttgctaaaataaaaagttggcacacaaataaaaatggaatatataattgataaagccaattattattttgtaaagattgatattgtcaaatttaaaggtttgacattcttttttctccagcaaccaaactattcactctatttgtagtttttttttccttatcataaaagcatccaaagcgttttaaaaaaatcattgcataatgtataatgtgttatgggtgaacagtcaaaatgcaaattgctaaacaatttagtacctaggctttatatttgaatgagtaaatgctgtgtgtttaatgtttatcaatgcattagtggtagattaaacatgggttgagacttgagagcatatatctccaccataaatattcagtcgtaagtccaaatattttcttgaaaacaacatttgaaatgtcataataacaagtaccatttggaattctattacaaaagagttaatccatataagtcatatagattttgattggtaaattggtaacacgataaaaaaaatgaatgaaaacctactttcacaatcttttacttgtcagataattttgaaaacttttttctacaacttcttttttcatttgctttgattatgcgatgatattaacaaatgaaggatgcgactaaaccttcacaacaatgaaaaccaaaaaaaaatccatttaccatagttcaaacttcaaacacggtatataaatggtgaacatgcaggagttaataatccctcgtgatgaggaaaacaaaactcaaaactcaaaagaaaaatgttttgagtggcgcgagaagaaacctcgtaatattgtgtagttaaataatgttaagtggtgttttatgaaaagaatacaacttgaaaagcatttattttgcgtgtattcgatggagaaaagtatttagtagttgtagccttttattgaaataaaaatggttaattgggtgtcgaagaaaaggatatagggagctacgtgtggtggtatctgccatgtagaaaatcgaagcgcatgcacaaagttggactcatgatgagacttcacatgaccaccttcatttattcctcctactcctctctctctctatgtacagtattagtattaaattacgtatataaaaaaaaaaaaaaaatattacgtatatataaaaaaaaaaaaatattacgtatttattttttgtcctagcgtatagacacgtagaccgtagttataagaagttagtcgtttgtccgagcattgattttgtacaactcttacagaacctaaaacagactgtacttaccaatgccaaacttgtctgtcttctctttctatttatttcttgactcaaatttgaatcgaatatattcataatctgaccagaaaaaaccaaaactctaataaacaaaaaagctttgaaactaacaaagcgaagccaaatttcataaaagaaagtttaaacacacaaaaagtcctaatttgaggcattttttgacaggactaataactttatatttcaaaaaaataaagtccctttcacgcttctcacgcgctcggtgagtgacattcccacaccattttcctcatgcatgcaacatttatcatcatcattatcataaacctaatgcatacaaagatgtacgtagatatacacatgatgatatattgtacatgcaacatacatcagcatcagcatatgatgaacatcagaaagaaggaaagagaaagaaacttatgtgatgtccttctcacagagctaaagacaacagcatttttttttccctaagttagcaaaatacccatttcgtcaaatatccgtttcttctgacaacaatttcttcgaataaaacataacaatattaaaaagaaaaggtaaagaaaaaaacaaagattggcctgtcttctctgcctccatattaagttagttattttatatgtatttttatcattactgttgtgggtagagtaaaaaaaacagatgggttttgcagagactgttttgcgtgtgttggcttttctcctttattgtctttccccttttttatcctgcaccttattttaattatttcttagctaattttttattgctacaaatactagaataattttattttatttttgcatcacaagttataaccagaagaaacttatgtagtaattagtacacataaaactcaattgcattttctttttacatttttttttttttttttttggacaaatcattttctttttactaaagtaaatgtttttagtgaacacattgagtacaaatatggacacaaagtataaattattatgagattttgcagtagatattaatttattttagctatgtaaataaaaccgtaaaagtaaaaagcttttatcaaattcaacccacctggcgtttcagttttcattttttttttacctttatgctgtttttatgttcttgcaagtctttctcgcgccacacaaaagaaaagtaatttcttttagagttatgttttattttttttggaccatgtcttaaaaggatctcgagattggcgtctgagataaagacctctactttgcttcctttatcttgctcctcttatctcttcgcttctccttcctctcctctctcgccattgccctctggcgttttctgtcttgagctaaagaaataacaaataaaccgaaaaaaataaaaatagaaacttttttttttgtttatttgttctttctccaaaactccttttttttctcaccattatctcatgaacgtgagtggaggctctctgagtagagagagcctacccttgaaaataacctagggatttctccaattttcaagctttacccattcaaaagaatcgtccttttttcctatttctgactttgagctatgatgatggtccattcgatgagcagagatatgatgaacagagagtcgccggataaagggttagattccggcaagtatgtgaggtacacgccggagcaagtggaagctctcgagagagtttacactgagtgtcctaagccaagttctctaagaagacaacaactcatacgtgaatgtccgattctctctaacatcgagcctaagcagatcaaagtttggtttcagaaccgcaggtgaaatttcatcttctttccttatcaaagttgttaccttttgtctgtattaattgttttcttaccattagattatctttttgtttgtatatgagtttatgaagatgttaaatgtttttctttctttgactggtcagttgtatttaagtttccttgctgttcttatctgacaagaattttttggatctcagtgatcattttgttatgagttttaatcgtcttctaaatctctttaaagcaagaaactttgtttaccatatgctttgacgtatctagttggttgaatatctaaattcacgaaagtgacatttaatcaaattgtctttgaatgcgtttccaacatttatttctgtcaaaagcttaagattttctgccagaaattatgatatgataaaggggaaaaatttacattatcttttcttctttatatcattggatgtgttttataaagacaaatggtgtctgtctctgttcatccactaacatttcttcccatcatccatgcacatttggcttttatgttggcttagttggtctaacgaagcttccttttgatttttagatgtcgtgagaagcagaggaaagaagctgctcgtcttcaaacagtgaacagaaaactcaatgccatgaacaaactcttgatggaagagaatgatcgtttgcagaagcaagtttctaacttggtctatgagaatggccacatgaaacatcaacttcacactgtaaagttcacttttcactattttctgtctctaaaactcaattctatgaagcattttgtttgaaagttgttatcttttttttggaatgtaggcttctgggacgaccacagacaacagctgtgagtctgtggtcgtgagtggtcagcaacatcaacagcaaaacccaaatcctcagcatcagcaacgtgatgctaacaacccagcagggtgagcttttcttgtctgctctataactctctaatgaattctgtttcccactctgtgacaacctaaatggttcttttttgtttagactcctttctatagcagaggaggccctagcagagttcctttccaaggctacaggaactgctgttgactgggttcagatgattgggatgaaggtaatactttctggcctgaatactcttaaagttgtataatctgatttctattctttagttgtgtctgaagatgaagttgtttatgattatttgatgaaccttcattgctggtgtagcctggtccggattctattggcatagtcgctatttcgcgcaactgcagcggaattgcagcacgtgcctgcggcctcgtgagtttagaacccatgaaggtaaagagtgcgatttgttacgttctggcttgtgtttataatcattagcttacgctagtcttgatttgaaaacaaatataggttgctgaaattctcaaagatcgtccatcttggctccgagattgtcgaagtgtggatactctgagtgtgatacctgctggaaacggtgggacgatcgagcttatttacacgcagatgtatgctcctacgactttagcagcagctcgtgacttttggacgctgagatatagcacatgtttggaagatggaagctatgtggtgagttcttgaatctgctttttctgttatgtagtttctgttttaatacttttgtcttcactcactgtcttcaggtttgtgaaaggtcgcttacttctgcaactggtggccccactgggccaccttcttcaaactttgtgagagctgaaatgaaaccaagcgggtttctcatccgtccttgcgatggtggtggttccattctccacattgttgatcatgttgatctggatgtaagtgacaactcgaatcggttcataacacttcagttctctctttataatatgatcatgactttgttttttcggttttgcaaggcctggagtgtccctgaagtcatgaggcctctctatgaatcatcgaagattcttgctcagaaaatgactgttgctgtaagttcaaatacctttatccaaactgtatatgacctgaacgacttggtatgctgcaatgtttcttaagttcggagtcttatttcaggctttgagacatgtaagacaaattgcacaagaaacaagtggagaagttcagtatggtggagggcgccaacctgcggttttaagaaccttcagtcaaagactctgtcggtaagtatctactttacttaatagctttatcaccaagaatttcttttattcttattctaattgttcaatatggatgaactttcaggggtttcaatgatgctgttaatggttttgtggatgatggatggtcaccaatgggtagcgatggtgcagaggatgttactgtaatgataaacttgtcccctgggaagtttggtgggtctcagtacggtaattcattccttccaagctttggtagtggcgtgctttgtgccaaggcatctatgttgcttcaggtacatgtcttaaggatttgataataaaaaaactaatattctgtttctgtctgtttctaactaacttgcatctttttttttttgtttgaagaacgttccacccgctgtgctggttcgattccttagagaacaccgatctgaatgggctgattatggcgtggatgcttatgctgctgcatcgctcagagcaagtccttttgctgttccttgtgctagagctggggggttcccaagtaaccaagtcattcttcctcttgcgcagacagttgaacatgaagaggtacttttatcaaagaataacacagcttcactttctcctctctctaaatacgtgttatagtcctgaaacctttcttggttacttgtttcagtcacttgaggtggttagacttgaaggtcacgcttactcacccgaagacatgggtttagctcgggatatgtatttgctacaggtttgacttcatactttaactccaaagtttctatgctcctttgttctcttcatgacattttggattcttgattcttgtctagctttgtagcggtgttgatgaaaatgtggttggaggttgtgcacagcttgtatttgcccctatcgatgaatcatttgctgatgatgcacctttgcttccttccggtttccgcatcatacctcttgaacagaaatctactccggtaacatgtcaaaaagccatttaaggatcagtcccaaatcatttattcttgacgcaatattctaaatttctaatccttcactgtcatatagaacggtgcatctgcaaaccgtaccctggatttagcctcagctttagaaggatccacacgtcaagctggtgaagccgacccaaatggctgtaactttaggtcggtactaaccatagcattccagttcacatttgataaccattcaagagacagtgttgcttcaatggcacgtcagtacgtgcgaagcatagtaggatcgattcagagggttgctctagccattgctcctcgtcctggctccaatatcagtccaatatctgttcccacttcccctgaagctctcactctggtccgttggatctcccggagttacaggtacttcattatcattagcctctaggtttctgcttttgtttacatgatctatggagtattttatctgaatttctcttcttttctttttggctttgtagccttcacactggtgcagatctctttggatctgattctcaaaccagtggtgacacgttgctgcatcaactctggaatcactctgatgcaatcttgtgctgctccctcaaaacaaacgtaagtaacaaggcttcccattcagattttgtatttgtgactagaacatgttcttgagatgactgacataaattctcatctgtaggcttcaccggttttcacattcgcaaaccaaaccggtttagacatgctggaaacgactcttgtagcccttcaagacataatgctagacaagacccttgacgaacctggtcgtaaagctctttgctctgagttccccaagatcatgcaacaggtttttgttttttcttgggaaacattttgacattttcttggaaaaatcattgtttgacttggaatctaaattttgttttacagggctatgctcatctgccggcaggagtatgtgcgtcaagcatgggaaggatggtatcttacgagcaggcaacggtgtggaaagttcttgaagacgatgaatcaaaccactgcttagctttcatgttcgtgaattggtcgttcgtttgaagaataataagaaataagaagaccagattttactccatttttcccttggtagggaggttatttatgtaagatattaaagttaggtgccactatgctccaaagtcttttgaaattcgaggaccaatatgtaatatgacgaatgtctgatcttgtatggattgttcttgttcctatgttacgttatatggcaagattattatgataatgttatcaagttttttttcttgtgctcgtttgctttcacaaggtgactagtttctattttcaactacctatttatatgaccatctatgtctagtttgtctactatagggggttcttgtttgacgtgtagttttttctttccctgaatgttttagttatgctgctaaaatttagctctttactgaagtctcatagtttgtagccaaaaaaaaagaaaaaaaaaaaaatatatgagttaaaatttcgtaaatatctaattggacaaagaaactatattaagttttggaacatctaacaggctaataataatgatgtttcatttttataaagtaagaaagatagatgaatgagctagctggttacgttgtgcaattttggagtatgtatatcaataattataataaaatagaaatatatgtattattgataagatattatgttagatttgggtattattgttttgtataatggagggtggtccaatttgaatacaggttctagttgtgcgaagccgttaatagcactgcaaacaaacttaaagattagatttgcatgaatcttcacaataaatgaatacatcatgcctatttataaattgatcgtacactaaaaaaaaaaaaaaaacgtatactgaaatcgtatctatcataagaaaagtaaatgatgatgatgcctcctactctttagcttataggcagagaaaccttttttttgtcaatgaaacctatacacgtttttttctctgtagttgtctattttaatgaaaattttaaatgttatcgtattctactgagaaagccaccattttggtaaaagactgtagcagaaaaaaatggttaaaaaaagtttttagaaaaacggtggaagtgaccattttggtaaaacggtcgcaataacatttccataattgtaggaaataagtttatcaagttgctgcgcgcctctcctttagctttagtaaagatgaataaataattcataggatatcgaaaaaacgatactgctttaataattaatattattgtactaaacatttaatcataattttgtttcttctcataattttgtttcttcccgtgtatatgcatcgggaacaatacatttccttcccatttcactagaacttttgaaggcaccaccaagtttctggattttggaaaaaccactgatgatggtatattacataaggcaacatcaactttgtagcctcttccctccatggctctatcaccataagaaaactttaaggtcatgtctttggcttgcacaatccattgacaatagattactatatatgaaggagcattattaagcaatagtatgttattgacttgaatagtttgtttatctataaaatatataataacaaaaatcagaagtgaaaactataatatctaaactactcttccgttccattttaaatgatattttaatagtattatgatatatcatatattaatggtattaaataaaaataataattatgatatatcatatattaatggtattcttccgttgagggaacataagttatgataaaaaaaaattagttatcgtgtaatctcctagatccataacatcataatttaccgtaatttttatttattaattccatgaaatttagtcttgatatcaactcatgtagcaagttacattttgattcttgaattaatttcggtgtttaaagcatgtatgcatgcattatacggtctcgcagaagatattagatgtgttctatctgctatgcctttaggttactaatctaaaccaaaaataccaaataagcaaataaaccacaaagcagaatacaagcaaccaattgtataactaaattgaacacatcttttgacgacattccctctccgccacaacatttgacatgtcgtttggcccataagaaactcgccactagagccaagatgaggaggacaccaacaaccacggtggctataataaagtaaccaatattcttcatattgctcttcgaattcactgcaccaaaaatttcttctttttaactttgttttgtgtcttcttcttctccggtataggtgatgtttatatacacgtcttgtcaacagaaaagtttaacatttttggaaaatatatatttacattttttcactaaggaacattggaagttttacattttacggcactttcttgatcctcataccatcatatatgtacacatgtatttagtgaatcaaaactattaaactattttaacatttttcttctaaaattaataattaatttctaaatttccttaattattgtacaaaaaattaaaagcaataattttttaaaaattttaaatttcattaattatatgatgaagtttataatttgttttatttttttttttaattacaagatatatatagtttctttatgtttaactttttttatatttaatattttcttaattcaaaacaaaaaaaaatatattttaatttttagtttatttatttatttataagatactaatagtttctttatatttatcgtctttacttttcaatcctttttaatttttatttttcaaattataagagacataactttttaatatttatcttctttactttttaatcataaatattttatgataaattaattaaattatgtattggttgttttatgaagtctaggtggcaagctattagatgctaacgtatcaagctgtgagaaagagttaagctcctttcatatatataatacaactaaaaatttgaatcgtcaaagaaaaatacctttaaaacagaaattttctgattttaaaagtgcaaaaaggttagtaatgccgaattttaacggaggctattttgtccaaaaaagattgttaactagcgatgactatgaggcttgagattcttcaccaataaatgccgactcgcttggattagggatatatttcatcaagatacgtgattactggtgcccatgcatttacatagtaactttacattgttaaatttaacattttgtcactaggtaatcttacctaagaaaattaaaaattaaaaatattatatttttttgttgaataagtaacacaacttgtcatgatgggactatatcattaacacaacttgaagcaccaactactttaattaatttatagcctcttccctccatggctctatcaccataagaaaactttaaggtcatgtctttggcttgcacaatccattgacaatagtattactatatatgaaggagcattattaagcaatagtatgttattgagttgttttttttttattttaatgaatgacttgaatagtttgtttatctgtacaaaatatcataacaaaaatcagaagtcgaaactataatatctaaactactcttccgttccattttaaatgatgttttaagaaaataataattatgatatatcatatattaatggtattctttcgttaagagggaacataagttataatacatatatcatgtgatattgatgccttgatggtattgtagagttagatatatatatatatatatataatatttccacagaataatacacaaacaaaacaaactaattaaactcttttaaaaactaaaaaggagcataaatctattttcttataattatgtgagaaacggatattattatttatcacttatttttttttggtgagaactatgccttggctttggctagtgctttaaatatggcctttaatgagacaatctcatttgtctatctttttcactaacaaagaacaaaaatgggtctggtaacaaaagctctcaaatatctcttactcctttctatttccttgactttcatctacaccaatgcagtttcatccgcttctccaatgactccaccgtcatcgccggctaagatgagcaggagacttgtggcagttgaaggcatggtttattgcaagtcatgcaagtattccggcgtcgatactctcttggaagcatctcctcttcaaggtccgttacattataacgtccaatctctttcaaaaaatttagttaccatgtttttatccttttttttgccatgggaccaaaattgtaggatttacttaattgtatgtcttaaacctttttcatctttcaataaaatatttatattattagcaaaaaaaaataaaattagttaccatgtaatctcctagatccataacatcataatttaccgcaattttttttaattaattccatgaaatttagtcttcatattaactcatgtagcaagttacattttgattcttgaattagtttcggtgtttaaagcatgtatgcatgcattatacggtctcgcagaagatattagatatgttctatccacttgatggctacaaaatatgagatgaagtagtgtttgcccccaaaaaatagtcttgagtttaggaagtctcattatagctaacgatgcatggtagacatatttctgaatgaaggaacttgaattaacgattttaatccaaaaattagtgtgactcaaataagcactgatatgcttaaggtaaattccacttatagtggtatttgtatttttatagtgttgcatgcatgttctcttcttttcaaaccaaacgacaaattattagaaaacttaaaactgtattttaaaaaatttacacatatgaaaaaaaatgttacaatatgcatggtacttgtgcatttcgcattcgtcgagtctctcacgccacttggctttcatgcatcaagtaaatcttttcgttattttcaatgataggagcgaccgtaaagcttgcatgcaacaacacaaagagaggtgtgacaatggagacaaaaacagacaaaaacggatacttcttcatgctagccccaaaaaaactcaccacctacgctttccacacgtgccgggcttggcctacgaatcctggacccacgactgcaacgatgacatgcaccgtgccgtcaaagctcaacaatggaataaccggtgctatgcttaagccttctaagacaatcaacatcggtgaacacgactacgttctcttctctgttggtcccttcgcgtttgagcctgcctgtgctctttgaagactatactttcgttttatgtatttggtgtgtgcttgattgttataatgatgatcactagtgattttaatgttctgtcttgtttgttttcttggtacgtttccatttgaaatttgtgtgttttgacattataagatcgttagtgtgcatgtttgtagtaattagtactatttgtggggttgatatggtctcaaaccattgctctgacatttcacagttttatcagttgaaaacttcaagtaggtacttccttctccggatcattcatgagatggaaacccaaataaggtttttgcttgaaaatgtgaaatttgggaagccagaaacggcatcagatatggttcttgaagaagtttgatcgacatagtccggtttatttgctgtgtagttcagccaactaacgaaatcatcccatcagagataatgccaagatgggctgatataggttggtttcttgatgttatggtcaacaccgcagtttccacacatcactcatacttcatcctgtggacacttatgacataagccatcgagatatgattattagaggtgtggcaacagcattcagaagtttattcctatcgaacgctagatctgaagaagaagctaacaaatttgttgacatgtcttgaactctaggcaggcttggtacatctgttaattatgtgatttttaattcttttcatgaactcatgtctcttcttacatgtttttatttgttgattttgctatctctactatatatttgcatagtatctgtattgctttcgtttcggttctctatatatatatatatagaagtaacatgtaacaataacattgcaaatttgtaatgtataacaaaatcattgaaatatcaagaatagaggtacaatatcattaaattaaacaaaacttaattatcaagcagcggtataaagagaaaattttgcagagtcgcattatcgatctgctatggctttaggttactaatctaaaccaaaaataccaaataagcaaataaaccacaaagcagaataaaagcaaccaattgtataagtaaattgaacacatcctttgacgacagtccctctccgccacaacatttgacatgtcgtttggcccaatagaaactcgccactagagccatgatgaggaggagaccaacaagcaaggtggctataataatgtaaccaatattcttcatattgctcttcgaattcactgcaccaaaaatttcttctttttaactttgttttgtgtcttcttcttctccggtataggtgatgtttatatacacgtcttgtcaacagaaaagttaacatttttcactaaggaacattggaagttttacattttacggcactttcttgatcctcataccatcatatatgtacacatgtatttagtgaatcaaaactattaaactattttaacatttttcttctaaaattaataattaatttctaaatttccttaattattgtacaaaaaattaaaagcaataagtttttaaatttcattaattatatgatgaagagtttatattttttttctcatttttcatttttttttaattttttaattacaagatatatatagtttctttatgtttaattttttttatatttaatattttcttaattcaaaactaaaataattatatttcaatttttagtttatttatttatttataagatactaatagtttctttatatttatcttctttacttttcaatcctttttaatttttatttttaaattataagagacatttagctttttaatatttatcttctttactttttaatcataaatattttatgataaattaattaaattatgtattgcttgttttagatactgacatatcaagctgtgagagagagttaagcttctttcatatatataatacaactaaaaaattgaatcgtcaaagaaaaataccagtaaaacagaaattttctgattttaaaagggcaaaaaggttaataatgccgaattttaacgaagacgcttttgtccgaaaaagattgttaactagcgatgactatgagtcttgagattcttcaccaataaatgccgactcgcttggattagggatatatatcatcaagatacgtgattactggtgcccatgcatttacatagtaatcttacattgttaaatttaacattttgttactatgtaatcttacctacgaaaattaaaaattaaaaataatatatttttttgttgaataagtaacacaacttgaagcaccaactactttggtttatactagaatttcaaaaccaaagagagtgaaattgaaacaaaccgtttaatacgttcctacaacccgtgtaaagcttcttctgcttactatgagataaactgtgtttattaaaagaagagataaaacgacagattaaggacatactcaatttattccaatgtatttcgtcgctgttgttatgacattacatagcttgatgtgagaacataggttattttgtctaaagagtaacaatagttatgcctttttttcaggctcttcaccaatcaataccgagttgcttggagaggaatagattatcaagatacgtgattaatggtgccgatgaattgacatagctttgcatatgtatcttagccgccgcctctgtaacaacattcataaataaatgaaaaaaacaatatcgtcagcgaacataatgaagaagaaactcgatttatgaaatctcaaacagagatagtattggaaaattcaaaatctaatatcctactgccaaatgaacttaaaaccaatgtgaatctcaaagagttctctcttatgataccaggacttatacaggccaaatattgccgtgatatctacctaatcctgtgaagaccttgaaactaatctgactacttaaactactagtttatcaaacacaccatccactttgagcatattaactagttgatgaactcaccatcctctttgagcatattaagtaggtgagcccttgtgggaagagcatacatcccaagagaaacagctttccgtatagcccatccatggtggggagcaaacacttgagcataagacttagttgctggatccttcaaggagttatctcctctgcaaaagatatcaaactacatttcaatcttctaatcttgaccaaaaataaaagaaaactacaacaggactccattttttcatttacttcagtgtccatatttaaatcacacatcctacaaactggcacggctaatgcatttgatcaaaattttcacaagaactcaaataagagagagttcagaagaatcacttactcggaagctatgatctgttcaaagagaactttgaccatgtcaagaccacgcttaaccctcaaaaggtttctcgtatgactaccagctttccttacacaatctgcctcaatatctttgtccatcattaccactaatgtcgatatcgaactcgacgccctcacaagatcatcaacctatagtcacattcacaagttttaacatttcattttccaaaacattcatcctccagataaacaaacacaacatccatttccatcaaattagcaaaattcagtctgagtactacagaaactaaatcaattccaacatctcacaatatactcaatagtacatgaaagtgaacacaactagaaaaagattcggactttgattcaaatctactacataaacaaaccttggcaacatagtccatttccgcaaacttaaaagctattccaaggcaaccaaagagaggcgagaccagagagcaagcgtgagagaattgcgttacaggaacttccggattcggtgaattcacgatgattgctagttttttgaaagcggctgagatttttctcagtggcttatctgcttccgaatccgccatggaagatctctctccttctctctctctgtcgtcttctcctgattaacaagttttgttcttgtgtgattattccgattggtgttctgtgatttgccgcggaatctactttgctgcaagacgactcaaaaaggcggcgattcgctgatcactaattgtctttgtttggcgttcagatcattcctatccttcatctggatagtattatcctcaccgtgtgaatgaataaccgaatccaaccgaaataacctgtaggaataccgaaataatagaattgaatccgaaccaaattcggttttgtgcaattgaaccgaagaaacataaatacgtatgcttaaactatagatagtagttgggcaatagacttgtgttgaagctacttgaagaaaagatgatgatgatgatgaattatgaataatgttcaagaattaagatatgaagctttcattgggatactttagttaaaaagattatcatcatcaacaaatgtgatttttttcaaactttcatttatgttccactctggctatacatatttttgtttttcgattcttttcattgattaaaacaaggtaccaaaattataggtaggggataataatatttagtgggttatactaataattattgggtagaaggaatggcggatgcaattattttgattacttataaaagatagtgacattaattgattcttaggtggagcttattttaaaattaattgaagatttttatgagtaataatttaggataagtagaacacaaaaaatttaaatttttttaaaaaggaatctgttttcttgactttttgagcacatcattttatcgttggttaaataaataaaaacaatttcatcagttttcgaaaaacgtccacttgccatttaactctgcctttacggtttccgccaatttaaaattctctaaattttcaaacttttctctctcaccatcaaattctctaatttattctctttttataatgttcctctcttttcttctggataattacttttcattatagtccctatactactataattatccacaactgtctcatacttttataaccgttttatcattttcaccgggtaaacttagaaacaaaattgagtttccgacatcgcatgataattttaaatgtaaggtacttgcatggaactttaaaaaataagagggtgaaaaacataaattaaagtataatataggggtgtatattttgggttaaacatattacacaacacactcttccgctacacactgtttacactgttccttacttttttttctttttctttcgccaacatctctctctccagctattttccctcaatttttaatcgtcgttttcacttttgttcgattccattcaaaaaagcttcaatcagtgagctgcgttttttattctctgcttcatccagatctacatttctctgtttcagcctctattgctctgtttaacaagttctcaacggccggaatcgtcgccgggattctcgccaccggagttattgtgaaacggtgaaaatgggtttttgattttactggttacttcattgttcagtgcagtaagtatttattttccttgtcctgtcttactattggtttatttccttaaatgaagaaactttattttccccgaatttcttcattgctaaaaactctcactttctgcaatttcgtctgcttgtttcactcacaagaatttcacatttttttcaaaaataaacactgcttaatgcggattggttgttcacaaaaggaccaaaaaatcgtagaaggtaaccgacagtgttagctgaaagaagccagaaactctgtttgtctgtgttcttgaatttagacaatctactaaagtccgtactttttttattagtaaatcctgttatgaccggacccaataaagtagagtaattgttacatgcgcgttccattccaaacaatgtgcgtgggccacttggtcatttgattctgtatttttacttcggagaaatttggatacaacaaataaagtagagagattgtgtataatgaataaagtttccttttttttgttaatgatttgatcatgcgtctcttctgatttgagtttcttttgtatctgcataagtttggattgatttcactatggaggaagtagcagctaaggttgaggaagaaactgtggaaaccaatgtagatgcagtgaaagaggacaatgcaactatagctaatgaaagcagaagcccagagagtgtttctgcagtgtctgtggtgtcaaatcgagctgcttctactaaaaagaaaccagttattagttcgaatttaataaagccaactgcgtcttcttcattacgggtctcgggtactacgcctgtgactatcaggagaaatagtactggaggagtaacagagaatttagctggtacctctaaggttctgcctaagcaagtgagtactactgcctcacgtactgatccggtaagacgatcacttccagaattgaggaagagctctgtgtcttctctttctgctaagactgtatccaaaccaagcctttccgagagtaaaaagtctgtccccgtatcaccaggtagtcggagtttgacaaagtcaactgggtttagtttaagtaagcctgagtcttctgctagaccagccatgagtgtttctgtgtcttcgaaaagagctccatcttcatcagttgacagtagtggcagcaggactagtagtggaagactacactctactctcacaagtgggaggacagtttctaaagtttcttctccctctgcgggatcatcaccttctgtttctagcagtataagatcaaagtcattttcgtcacctctagaccggacttccaacttctctggacggaagaaaacatctacccctgaaagccgtgattcacgactcattattcttccaaaggtggaggttaaagctggcgatgacatggtacaaattcactttctctttgtacttgctagattttcatacaataggttcaatcctttctgtggttgttgattaatggatgtctgtaattgcttaagagattggatcttagaggccacaggattcgcagtctaacctctggtggcttacacttatcaccaaacttagaggtaaacttatatttccatagtaacttcacagtgttctagtgcaatgctttgtgacaatgatgtttatgtacatatatgccaattgtggatttgaatagaagtagggaggattagttatttacatctcacgaggaaaaactttgaatcttcttagtgagttcctgctgctagttttaaaaatctccgaacgacaaatacaatcttttggacactaaatatgccgcctcatttatgcgagtattcaacttattttaatttcctctacttctactctttccagtttgtctatcttagagacaatctcctatctacgctggaaggtattgagatattgaatcgagtcaaggtcagtaaattcattttcctggggttcttggtttttaatagatatatatgctcacactagctatgattctgttactatcattaatctcaggttctggatttgagttttaatgatttcaaagggcctggatttgaaccacttgagaattgcaaaatgctgcaggtttctttctctcccattctatccttggttcttccttcatgagtgctatctgatgaacatttaaatcttatattacttgggcagcaactttatcttgctggaaatcagataacttcacttgctagtctgcctcaacttccaaacttagaggtgagcatcagaaattacaaagcctcttgttccaattttgtgccaaataattgctatcaagtcttcatacttacatacttgtggattgccccttactttttccaactatcacctttcttgttcccatggtagtttctctcggttgctcaaaataaattaaagtcacttgcaatggcaagccagccccggcttcaggtagattttctgtttcagaattgaggttgttttcagtaccttgttacaagtcatagttttttagagatcttataaatttttttttctcaggtactagcagcaagtaagaacaagataacaactctgaaggactttccgtatctaccagttcttgaggtttcaatctttatgttcccaatttttatttttttcacacatttcttatttggctgattggttgtcgcatgcactgctttaataaaacatcttatgggacatgagattacctagtataaaagattgaaaaaccaccacttatgggaaattctctcctctgaaccaatggtccaatttgagtacttaattttttggtaatggcatttggccctgttataacagaaacaatgttccattaattcaatacatatatactaatacgtagtttgtaatttcatattgtgtttttccttttacagcatctgcgggttgaggaaaatccattgctgaagatttctcacttggaagcggcatccatactactcgtaggtcctaccttgaagaaattcaatgacagaggtactcttttgtagaacgaagtgctgtagtttgcttaagactgatcgtttcatgagaaagatgactagcatgtctaagttttcattcatcatatggccttccaagtaagaatttttctgatggtgaaatctgagcaatagcatgttagaagaggtaggagattttgcgatgttagatcaatggagataaacacaaatgattttatctttatcaattgtttttgataatctggatggaaactacttctgaacggttggatttcttggaattgtgggaataacacaactaacatactggctgtattttaaaaaataataaccgcaatgattaaatataaaagatttaggaatgaagtgttttactgatacattagaaagtattcagaagttgtttcttgggatgtagcttggcatttatctaggtctatgtggtccatgataaccttaaaatttttctttagatctctctcgtgaggaagtggcaattgccaagcgttatcctccacaaacagctctctgcctcagagaaggttgggagttttgcaagtctgatcttgcagcaggtatgtatctgcctctcagagttgtataatctttcattgtagcttgatggtagtgcaatcttcatatgaaaactaaaacctttcactctcccttgatttttatttgttaccaatggtcacacttagaaagttgactgtttaatcaaattagcattttcatccctttcgtactagttgctagttgaacttttatgtgaatagataagtccgtttgttcaactccaagttccgtatttgcatctaataacttttaaatattcatattcctgcaacttcttgtgtgcagaatcgacattccgcttcttagttgagaggtggaaggacacattaccttctggttatcttattaaagaagcacatgttgaccgaccttctgaagaagctccctgtcaatgccactttggtctttttcaggaaagtcctactgctacagatcaagaattagccctgaaatttcaatggtctgtggcggacagatctctttctaatttcgttcctattcttaatgcaaccaaggaggtaaaatttactttgccatattttcatttgcatgtgtaaaaaagtatctgttcttttattctctttctaatttgcaataggtctattggcccaaacgtgaagacattggtaaaattctaaagatagaatgtacacctgttatggctgagactgaatatccatccatatttgccatatcttccccagttcaacgaggtatgcttcttcagttatacaataggccatatggacgttttccattttcatgtgctttgcactgtatccttctattggtgtcctctagaatatcacagtgaagtgctgtgcaggaaagggaataccaaaagttgtgagccttgaattaaatggggaactagttgaggggaatattatcaagggtcaagcagtggttgcatggtgtggtgggacaccaggaaagtgtattaccaggtaaatcgtgttttctgctatctccttttgttatatgcagcttctaataattctgtctattctaatttgttgattcacttatcattaataaccaaagaggtatggtttccttttttaaaaccagttggttgaggagaaagtggaatgggagccctgtggtgatcgatggagctgaagatgaggaatatatgttatctttagatgatgtgggatcaagtatggttttcatgtacacaccagtcacagaaggaggtgcaagaggagagcctcagtataagtacacagagttcgtaaaagcaggtagatggaaaaaacttctaatagatagtatcttttcctttttcactacattcgcatagcattgtcatttgtgtttctttgctttcattattgactaatggttcaaagtctctgtggttgcttgcttcttttgaatagttgttgaattctttacgatagcaataatcttatttatctaattttatctatggattagtgtaaattcctgtcaactgttttcagattgattaacttgcatgataaaactgattcatgtagtgtagtggttgttatttgtatatttctttatttttcatcttttaaactactaatgccgctgtctgtgaatttcctgatctgagggtactaactttaaattctggtggcagcgcctccatctgtaagtaatgttcgaattactggagatgctgttgaaggctgcgttctcaagggggttggagattattttggaggcaaggaaggtcctagcaagttcgaatggttacggaagaacaaggaaacagggtaactatacatgagtgtctgaatgtgttgtcactgcagtatctctactttcttttttcatgtttcttggtcatgtttgcttaaagcatatgttttattacagagaactctcgttgatatcggctggaacctccgagtatacattgacccaggaagatgttggcacacatgtaacttttgtgtacatacctgcaaattttgagggttggttttcttcccgtttcttttccctcgggttcttacttagaagaaagcctcaaattatagagggttaggccgtagacaattctgacgtattctagaaaattgcagggctagagggggaaccagtgtcaacttcatccagtgtagtcaagccaggtatgctaaaatcttgtaaaagacaggcttcttttatagaagaagatgttttccaaagatactgattcatgttgctcgggttcttcttgttgctctaacaattgactgttgtgaactagcgtctactagttctcgttattgggcatggcatgtttttttttttttttgtttttttcttttttttttaatatatatatatatatatatcttggtgataacgcttagcatttgatttgacgtattttatccattagaactgcctgtttggatttttttgctggactgtttctcttcatttttggctcattttggttttttttgtttatttttattgaaactccagcacccccgaaagtaacagatgctaagatagttggtgacttgagggagaatagtaaggtcactgtaacaggtactgttactggaggaactgaaggttcaagcagagtgcaatggttcaaatcaagttgttctatcctggaaggagacaattctcttgaagaattgagcacatcaaaagtggcaaaggtaggttaatgtctaatactcatcagaaaagtttggaagacatatatcttataatgttgcatctcaacggtttttccagtcattccgtatacccttgggggcagtgggctattacatagttgcaaagtatactccaatgacacctgatggggaatgcggtgaaccagtatatgtactctcggaaagagcagttgagagtaagttaaatcatatactctggaacttctttgagtctattagattgttgaatttgcttatttatgagtgatgagctatattttactcttgccgcattcatacatttattccagtagcaggatgattttctctcgactttaaatcatacctatctaattccaagtattctcctgctctgagttttgtgtttaggtgatcatgtattgtctttgatatgatcatgtttttgtgcctggactgattcagtgctaattattttgattttaacaactggcagcccttccccccagcttaaatttcttgtcaattacgggagacaatatcgagggtggaatattgacagcatcctacggatacataggagggcatgaaggtaaaagcaaatacgaatggcattatcataaggtatatatctttcaagctcttctatgctggtatttccctctgaaatttagtcttaactttagtttctatgttcagctccaggcacggtactgtgtcttttgagatgaagttcagattatccatgtgaaagtataattcagaaaagaaaaaaaaaagcctatgttttctgtaaaaaattagttgccaaaaaaatcttagtgtggccttgccttcgggaaatttagttgcatctgattgctctctccttcttcaagcgcaggctgaaaatgatctccctggtgcattgatacctgaagcctctgggcttcttcagtatacgattactaaagaagctataggtaaattcatttcatttcaatgtattcctgtgagggatgatgggattgtgggtgagccaagaagttgcatgtcccaggaacgtgttcgtccaggtaatcaatgtcttgttgtttccgtgctataagatgatcttggaattttctgatgcaatgtgaacttgaactagtttggcaaacttttagaatgcgagtttgaagtagatgaataaatcctatatataagtatagactgagaatcacagatactttgaagtcaagtaggcattcaaccaagatgaacatgaattcttctttttcctacaaatgttttctctgtctatttcacagcaattcttgccataaaggtttacttattatacgtggttttgttgttcactaggaaacccaagcacggtatctcttcatgttgttggagctcttgttgaaggaaccatgctatctgcagagaaagaatattggggtggtgaagaaggagcatcagttttccggtggttccgggtatgtaacttcaactttaccaaattttcaaaattaggatgtgtttctgactgcatctcttttttttccttttaccttcagttaattttaaattgtgaattttcttgcagactaattcagatggtactccatgcgaaataaagggtgcaactacttcgtcatatctactgtcagtcggtgatatcggttacttcatttcggtttcttatgaacctgtgagaaatgacagagcccgtggacccacagccatttctgaaatagctggaccaattgtagctggtataatactctcttcccatttgttatcaagctttgcggtatctgaaggggtactaatttccatgaacgagcggggtaagtgagatgatttatcttttgattcatttctctgcaggccatccaaattgtcagtcactggagtttcttggatcaatgattgaagggcaacgcttgagctttgttgcttcatatactggagggtaccttttataaagttgcttgagacttatgtgattgttagatggaaaactccacaactaaattaacattttgcaacgcaggatgaagggaaattgctatcttgaatgggttagggtgaaaaataatggtgttaaggaaatattgagtagtgatggtaagttttgatccattttatacctttcggttcagattcctttccgccgccttaaaaatccgcttcagattattcattatgatccctgaacagagtttttggatttatcactggacgatgtcggggaaagcattgaacttatttacactcctgttcgtgaagatggaatagaagggagtccaaggagtatcaggactgatggtattgctccaggtgagctgtcttttcaaatttgaaagaatgtcaatcttgtacttagtttttgtagaatgtccatttaagctaaaggttatacattctatcttgggtttgtacactgttttcttaaatttacttatctcagctccttcaatttttccttgtaaacagcaaatcctatggggttggagcttttaattcctgactgctgtgagaaacaagaggttgtgcctcataaaacttattttgggggccatgaaggtgttggagagtacatctggtatcgaactaaggtcaagttgcatggatctgcacttacggaaatatcctatgccggtgaagaggttgttgtttgttgtagaacattgtaagagacatagatttcccaaactgtgttcaaatttctttcttagtttattcttttggataagagtgaatgatctgattctcttgcagaaaatatactccatcgcttgaagatgtgggggcttatctagtcttgtattggattcctactcgcgtagatgggagaagtgggaagccagttgttgtgataacaaactctcctgttgccccaggtacagatattgtcacactttctattatcttgctaattttgtcctaatcagataaaacattgtagttaccaataattgaataatcattgcaaatatcaatctagtttgttatgctaatgactacttgcataatatcacctatcgatttaagctttttcttaacctgtcaacattcttttttctccaatctgtttaagccatagagctgatgtgtaaaagtttatgttctgacggaataaaatgaataatgttgcagctgatccagaagtatctaatgttcgtgtgaagaaacttttttcggatgcttattctggagaaggagagtactttggtggacatgaaggtccaagtctcttcagttggtacagagagaatgatggaaccattgatcttattgatggggctaactccaaaacgtatgaggtgactgagtcagattacaattgccggatattgttcgggtatgtttcccctgccatcgattgctttgattatttctttagcatgcgtgtatttatggctgttttggtttacacttttgaatgttttagttttgtctcattcatgaaataaactcctaggcatgtgttaacgggtctgaagcctttaagttttcagaactggcaatggttgtcagttcatcgattttaatgtttcttgttttcgaagtactgatatagggttccttagctccatgatggtttttgacttttgtatgcgaactttgaatcttagaactttttctacttattttgcaggtacacaccagttcgttcagattctgttgtgggagagctaaagatgtctgagccaactgaaattatcctcccaggtcttcattcttgatcactagcaaaagcttgatttcattgatttttgttcttgtgttatgttttccttttttgtttccattttgttgggtttcttcgagggttctctttgcaacacaatcctaacacttttgatcacaatacagaggttccaaaagtagacatgcttgctttcaccggaaaggctgtacaaggtgatgttctcacagccgtccaagtgatcccaaagactgaaattcaacaacttgtttggagcaagtacaaaggagatattcaataccaatggtatatggaatttcacctttaatccctggctaaatatatgcgtgagacatttttgggagttacctatgataactgtagattcagggtgctataagattggatataaacgatgccacaataacctttctcagaaactattttatgatttaatctcacataacaatggttgtgacaggttccgctcaccggaatcaggggataagatatcgtatgaggctctctcttcagaaatttcgtgttcatacaaggtgcggtttgaggatattggcagatgtctcaaatgtgaatgtgtagtgcatgatgtgtttggaaggtctagtgaactagcatacgccgagactgatccaatatcaccaggtttcatgcatttcagttaccattgcatcttgtttaccaatatctctgacgaggtgaagatgtgaccaactttgtgtctgcttcaggttttcctaggatagagaagctagagattgaaggacaaggtttccatactaacttatatgctgtgcggggaaattattttggtggtaaagagggaaagagtaaaatccaatggcttagatcaatggttggaagccctgatctcatctcaattccaggtaggcaaaacttgggtcacattgttatttccttcctgtcaaaagtaatgcttaccatttcttgtaagagtctcaattcttggttgtcttgtatccaaatacctggaaaagtttcaaccattttcatctgtggatttgattcaattcggtaaattttgtaggtgagacaggaaggatgtatgaagctaatgtggatgatgtcggatacagactggtcgttgtatatacacccatacgtgaggatggtgtccaaggccacccagtttctgcatcaactgagcctgttgctgttggtaagttttccagttatcatcataaatcataatcatgatcatcattgtcatgaatattgtcgttgttgtttgttgttatgtctgtgtactagctatagtcaccaagtctctcaaatatgacctcagttttacatacagtaactctttactaggttcctttaagacttaagagggatttctgtttccttttccacgactacttttcttttctattttccaatgggatttcacggtgatgtttaatttgcagaacctgatattcttaaggaagtgagacagaaattagaaactgggttagtgaagtttgaggtaagattaactgtgttttgttttcttagcttcactatcctttattctcttttttaaatgtctgttcctcaatcaattggaatcaggtgttgtgtgacaaggacccttatcccaaaaaggtatgtacttcataattttctggagttacagtttgattcgtgtacattaaattggggtttctaaaaggaactgctaatgatttagattgtgggagagggaaatctcgagagacgaatgctagaaatgaacaggaagagaataaaggttgtgaaaccaggttcaaagacgtctttcgcaactactgaagtccgtggaagctatggtcctcctttccacgtaagtataactttgaccacaatcactggactctttaatctgcaaactgtcttttaaagttatatcgttttgcatcaaaccaggtggagacatttcgtaacgaccaaagaaggctaaggatagttgtggatagtgagaatgaagtagacatagtggtgcagtcgcgccatctccgcgatgttatagtacttgtcattcgcggctttgctcagcggttcaacagcacttcactcaattctctacttaagatcgatacatgaaaccttaaagagcgaacacgtccattgcaactttatttcagtgtgccattcaaaatctcattcgctttgttgatggaattgtctctctgtttgttttggtgctttcatctttccaatatgctgcgctgtataccaaatgggttttaaaatcaaatttcaatcaggtttttgaagtgctattattacaaacccaacttcaactgaattgcatattaggtttggtttgttcttgttaaagactagactaaaagataatgactgtaaatgcatacataatttgttttcatagatgttaacctttgtttagtcaatttcaaattacgtttattgatctctcatatcacggaccttttgacacgaactcaatcttatgattagtttattttgttaatttttactctttttaggtggatggatatgcatatgcaaatggttaacatgtttgtcactcatctttcgtgtaatcttgtcacctatttccctttttcgtcttctttttccctacttttacttgtaaaataattacaaactccaaaccttttaggataacaaaagttttttctactttttttttctctcttccctatgtgaacatgcataaaaacatgacaaccaaaaacaatacttaatttttttttcaaaatacaagaaaaaaatcaaacaatgagctaatcaaatggtatcttaggctcaaaacagttccttcttgtgtaagatagttcgctgtttatgctaaccaactcaatctttgcctttgatcatgttttgtcgctttaaagattaaaggatatactttcttttctttctttattatgactttggtcggatttataattattgtatgtaaaatatttatatttctatatccatttgacattaaacaaaaggaaaccaatattaattattattatttctaaaaaaactgtcacagtgaattgcaattgtcttttatttccgttttctttaattttttttttttttgaaaatttactagtttgttcctaaaactttctttcaaattttcctccttcaaatcttaatttctagatattcaaaggaaaaataatttcgttgaaatcaagaaacaaaataataataaattaaaaaagcgaaattaaacaatgtctgtttctttctttgtaccaggttccatgtcagtatcacctgtgcaaaataaataaataaaaacatgcaattttgcttttctaaactcaattttggtctcagtagtatcattccaaatttgtgtgtttctaattgcatcgtttttcttactgttttttgagctttggaccaatctttgaccttttttcgaacttgctgtttccgcgaatcaaagtctcgtccttttaccttcttcctcctaaagattttctccagaaatataaaaaaaggcgattcctttatggtgatttaactcattcgcgagcttccttggtatgttctcgaaagcacatttagagatttgttatctgtaaactcatgctccttgaacactttttatctgcaagtgacgagccacaaaacaaaagcagaaaagagagcacttttgttactactatctctccaagcctttttgcctaattttgtttctgatgaatctctaacttcataaagcttaggcctttggttgaatcgtttgtacatttctaagaaaaaagagctgattttagcgatttcgatttgagtttgttaagtgataagagtctgaagaaatgggttgtgctgcttcaagaattgataatgaagaaaaggttttagtgtgtaggcagagaaagaggctaatgaaaaagttattagggttcaggggagaatttgcagatgcacagttggcttatcttagagctttgaggaacactggtgttactcttaggcaattcactgagtctgagaccttggagcttgaaaacactagttatggtttaagtttgcctttgcctccttcgcctcctcctacattgcctccttcacctccaccacctcctccatttagcccggatttgagaaatcctgagactagtcatgacttggctgatgaggaggaagagggtgaaaatgatggtggtaatgatggaagtggtgcagctcctccgcctccattgccgaattcttggaacatttggaacccttttgagtcacttgagctgcatagtcatccaaatggtgacaatgtagttacacaagttgaactgaagaagaaacaacaaattcagcaagctgaagaggaagattgggcggagacgaagtctcaatttgaggaagaagatgagcaacaagaagcaggaggtacttgccttgatttgagtgttcatcaaatagaggctgttagtggctgtaacatgaagaagccacgtcgtctgaagtttaagctgggagaagttatggacggtaactcatctatgacaagctgctccggtaaagatcttgagaaaactcatgtgactgattgtagaatcaggaggaccttagaaggaatcatcagagagttggatgattattttcttaaagcatcgggttgcgagaaggagatagctgtgatagtagacatcaacagtagggatactgttgatcctttcaggtaccaggaaacaagaagtaagtgactgactgagatttttaatcttttttgatgttggaccaactacagattttgatttgtgttcataagcataaacaatttgttgtacatattataatacttatgtggctcgcagggaagagaagcagctcggcaaaggtattcagtgcattgtcatggagttggtcttcaaagtctcttcagttgggcaaagatgctacaacaagcgggactgttgaaccctgtaggcctggagctcactgcagcacacttgagaagctatacacagctgagaagaaactttaccagctagtcagagtaagagctagctgatctaactctttcggtgttagattatcaagttcaacaatgaaatactaagttttattctctgaccagaacaaagagattgccaaagtggagcatgagaggaagtctgcattactgcaaaagcaagatggggaaacctatgatttgagcaaaatggagaaagcacgcttgtctttggagagtttggaaaccgagatacagcgtctagaagattccataactacaacacgctcatgtttgcttaacttgatcaatgatgagctgtatccgcagctagttgctttaacttcagggtaaactccacaaccactcttatgctgaccatctcattgaaaagcattttttttatgcgatttgcatatgtcgcttctcaagattgatttggtcttaatatgtgcaggctagcacagatgtggaaaacaatgctcaagtgtcatcaagttcaaattcatatatcccagcaactgaaccatcttccggattacccgagtatagatctcagttcggaatacaaacgccaggcggttaatgaactagagaccgaggttacttgctggtacaatagcttttgcaagttagtaaattcccagcgagaatacgtgaaaacactctgtacgtggatccaacttactgatcgcctctctaacgaagacaaccaaagaagtagcttgcctgttgctgctcgtaagctctgcaaagagtggcagcttgtatttgaaaagcttcctgataaggttcttctatcacttgcagcttatttgtattattctagttcatggctctatgaaagccatctttaatacgtgcaaatgcaactgttttgggtggcgtaggtaacttcagaggccattaaaagctttctgatgtcaattaaatctattattcatcaacaagctgaggaatacaacctgcgtaggaaatgcaataaacttgagaggaggcttgagaaagagctaatttcactggctgagattgaaagaaggctcgaggggattttagcaatggaagaggaggaagtaagctcaacgagtttgggctctaagcatccgttgtcaatcaaacaagccaagatcgaagccttgagaaaacgagtggatattgagaaaactaagtacttaaactcggtcgaggttagtaagagaatgacactagacaacctcaaatcaagccttcccaatgtctttcagatgttgactgctctagctaatgtctttgccaatgggtttgaatccgttaatggccaaaccggtacagatgtttccgacacatcccaacattccgatgaatctcaaccctaagaaaagacctcattccctttttgatgtttgtttctttcttggtgcttcagtgaagaggtttttgtatatgaatgactgtaagagaaactcaacttaacaactttgtccagctccaaaatctgaaaagggtattattgtgttgctgcttgttcatgaatcatgagatcccatttatgagttagaaggatactcaagtaatttctctacttatcacgaagaacacaacagggtttgattttctttgcaggtgaaaattaagtttatgaaatggaaaccaaactaataattttggttaagataaatatatgtttcttacggaagagacaatgattcctagtttaacatgaacttatctacatctcgacgttgtcccagtcaaatgtatttccttcgaaattgtaatccggttgttgcattcggttccttgccaatctgctcatcactgcaagccctgaaaacgtagacagcggaaagcaggcgttcaatataagagcacgatttgactttaatgtttcagtgtggtgattaagattttgcataagcatttgtagagatgcatatatttgtttaccttctaccattctatagagtgatgacaaccatccctctctagagatattatgttcctcaagcgactctgcaatctctttgtcgtgtttcccctcgagaacactgcgcagagtcacaactgcatcgtttgttctcttcaaaatgctgctgtcatcttcaatttcaaggctttgaagatcgttgtgcgacgaagtaagactcgcagccagagcaaactgagcggctgcagcccagcgagaagaagccagccatttcctttggccttgtaagtggtgtgagtcatctttggcacgcttgttgtcgagtactaaactacgcaagtactcagcatttgcagctccagtgctttgaaccatcttggagaaagagcttccttcatttgaaagaaggttctccggtgaactgaattcttgaacctgagttaacaaattggaatagaacaggttagctgagaaacaaggagagtgtgagattgaaagagagagagtgtttaaaaataaaatacatactcttccagaatcaagcacgagaattttgtcacagtcaatgatggtattgagacggtgagcgataatgagcatcgtgcatgacttgaattcttctcggatagtcttctgaatgagggcatcggttctaacatctacagcagcagttgcttcatcaaggacgagtatcttagatctccgtaacagcgcacgtgaaagactcaacaattgcctctgtcccacgctgaaattctctcctgcctcagagacctgaacaaagattgaaaatcagttattaccacttaaaaatgagacttcatatcaatataggcagcaactgaatacctcagcatcaagaccaagaggatttctgcggatggtatccttcaagtgtgccctctctagagattcccaaagatcagcatcattgtgttcaccaaatggatcaagattgaacctcacagttcctgagaaaagaaccggtgactgtggaatgattccgagcactttacgtaggtccatcagtccaaactttccaacgtcacaatcatcgattaagatccttcctttttccacctccacaattctaaacaatgcattcaacaggcttgactttccagcaccagtccttccaacaatccccaccttatctgttggatgaatgaagaaagaaaccccatgaagcacaggcggtaactgagggcggtaacggagaacaacatcctcaaactttatggatccagatgatggccatccaggaggtggacggttgttctcaatgacaggcggagcctctggcggaatctctatataattgccaacacgctcgaccgcgtttagactattctcagccaaactcgcaagtctcagaacacctgttaacaagctagtaatatttaaggcataactgagaagcaaacccattgtagatgcaaatgcctgttggttctccgctcttccattctgcatgacagcaaacgatgctgtcagccatatcataagaccacccagagtttctaaacggattccaagccaccgattggcacccatgttgacaagagtgaatctgatgttattatccattgatcttccgttgatatcagccatacgatcatatgctttgtaagcacggatagttgataagccattcaatgcctctccaaactgtgcataaacaggcgatcttgaaattgaatccatacgcttaacctcacgggctgtgttctgcaataagaaaaatagttaacacacaacataaacagcatgatttttggtgacagatgagtgtagatagcttaagcaccaaacgaactcagacatgacaaatgaggctaaaaaagtatgtgtaacatcaatcatctgtgtccttttctctttctgttacttaatctcagttatttaaatgctgcggttagaaggtacattacctgataataaagataagctccataaaacaagaccaggaggggcatgatggcccacaaggacaaagtgcttacaatgccaatcaacactacagttgaaagaagctgtgagacttgacccataaacatgtttacaaagacggccacagttcgatcaatatcacccagatcttttgcgaatcgattgattatccgtcctagcggattggtatggaagaaggacatcggggccctcagtatggaatgaagcatattgtcgtgtaacttcttagctgcataaagactggacataatcaaccaatatgaattggtcaatgtcaccaaaacctgtaagcaagaagaaagagtctcagcaaaaaaatcaattctttactaaccttttctacctccacctttggattctcaaagtaaaatcacaaaagtagaattatataagatctttctaagctggtcaggtttcagctatatatgttatatcatgaggtcaagattatatcaaatcttcactcatccatcaagcaaacataactcatacctgtccaaacgagagaagtgcatatatgagattgtagaaaaggggtccatgactctttggagttcctgcatcagtccactcactcaaccacgtgctgctagtaacccgaaatacttctgttaagacgtaacataaaaggagcatcatcactacccatgcccctccaagtgcatcctggtacctgaaaacattgaaagcctggaaaagtcattctgatatcccgcaaaggtatagttcagcctaaaaacataaggaacatgctagtttgttgtgaaacaccacaaatgaatggacctcttggatcgagtatggggaaagttgcaaacaaatagtaagattgcaaaagccaaatgttcaagttacctcttcaggactctccaacttacaactccggtttcacgttcttcttgcttgatgaggacagatttccctccttttttatttccttctttggattttttatcgtcacttccatccatttgaagaccatttgtgttcccattcgcaactggttgttccgctgtttgatctgcctcagcttctccattttcttctgaatattcttccaccttccctgcattttccattagcctctggaacaaagggccattactggatagctcttcatatgttccttcctctttcactgtgccttcatgcacaagtacaattctgtccacttgtgataggaagtggagctggtttgtaacaagaactctcgttttctgccccagttctctttttatgcatttttcaaaaacctgaaacaatattcctagaaatcagactgacagtattcccataatgaccagacacaaaaatgttagataaattcaaaaatgaaatagactagccttatcaaagagaatcaatgagttagtacctgttgaccaacatgagcatcaagggcacttaacgggtcatcaaagatgtacacatctgaatttgagtaaacggccctagccatggaaaccctctgcttctgtcctccactgatattaacacctctttctccaatctccgtgagatcaccaccctattaagcaagagaaagaggttgaaacaaacttagcaacacgagaacaggcaagacaaatccttgttatcaactccacgaagctctcctcaaaacttacaggcagtaactctaggtcatgcttcagtgaagtcacatcaatggccctttcatacttttcacggtcgaaaggagaaccaaacagtatattgtcgcgtacctacaaatttttataagaaaatgcatatcagtcttctgttcaaaatagcttagagaatcaaatattgaagaaggtttccactaagttggtgaagtaactgacgcatttgagaacacatattgttctactataaaagacagaaaatacatttaacattatgtacaacagaaaaatttgcaacgtcagcccaacttaaaagtcaaagaaaagaagaacatactgttgcattaaagatccatgaaacttgtggaacataagcaactgatcctctgagagtaactattgcatcagatgttgcaggaagttcaccaaggatagcagatattagagaggtttttccttcgcctgtactaccaaccacagcaactaggctgccaagaggtacatccaagttgatatttgacaacgtcggcctatccccctgtagatacatagggttagctcgatttttgtactttctatggataaaggtaatgagagaagcgaaagaaggaacatggtatagaatagccaagcgacaccttagaatcccaagagaaatatccatttcttattgagatggctggctctccaggttcaatgggaggatttggtaagagaattctttcttctgtcgccaatacctcctcaagacgttttaaggatacattagcatttaccacctacaagtgaaaactagtcagcatcggcatctgtttctggcaccagcaaggataccctccagcatgtaaattcgaaatataagtcatggatttgataaccaaacgacagttactacaagcactaacagttctacttaatacacatgcattgcaacaacatatttaagaaatcacctgagttataatgtttggaagcatgaagagagggaaacgaagcacagcaaagagagagagtgacgtaaatgctcttgcaggggtcaggtctcctccaagtaatgtgaacacaccaaatgaaacaatagtcacaagaacaggaatgctattcagtatgaacatattcaactgcaaaacaagacaagaccaagcaagagttagaaatatacaataattagaggaaaaacaaaagtaactacgctgtagtcataccgctcccaggagctgtgatttccggaaccaagataattcatcatcacgaacagtttggaccttggactggaaactgttttcccaagcataacacctgtagcattttggtttagtacaagtttcctgcaaattaataactatgttaacaaaattggttctagaatttcttactttactgtatccattgcagctaaaacttcattcataaggccaattctcttgtcagtacgctgcagaccttcctttgtcagcttctgcattttgcttataataacagtctgttttaagaaaacagagaacaagttcaggagacgaagaagaagtagcctttaggagtacgaatgaacaagcgaacagtatagagaaaaataagctacaaaggaaaaaaaatgaggaaatttagaagtcatgtacctgtaaagggaacataaggaccaacaacaatgcaccaatgagcgaggcaacacccaattgctgatagaggagaatcagtgctataattatacgaaatggagccgaccacatggtatgaagtgattggcatatttgctgccacagaaaatggaaaaattagtacaaagtacatctggttgattagataacaatattgataccagacacagttaagacgaaaacattaaacaagacacagtttaagttggcataagaaacaaaataaaaaagaagaaagaaaaattcaatgataacaaagtgctagctagaaatgaaaatgcaatcactattcatagccaatcttagacctaacaaacagattcagtagatcagtatgctggaaatcatttctaagtaaatccaacttctattaccgaacataaaaagtaactgtaaccactcaataccagctgcggacaaaaataaatattcaagatccggatgttaacagccctgcaactatgatatagagaaacatgcaaacttgaattcgaaaatatgaaagggatactcacctgaagagattcggcatcagtcgtcattaagttggttatctttcctgtttgaaactttctacgaccttcattagttaacctcaacgatttgcggaacacagcagcaatctaaaaaaaaaacaagtcatcaacaggaagaccaattttaaaaatcatctgtgttcaaaatatcttccatttcgtacttgctaatttcactccactacaaacgcagaaaagcatgaactgaatcaggaaatacagctaaatttgtatttctctagtgaaaggatctgaaaatggtggaaatttccagaaataaaaacagcatactcaatcatctgaagcaacacaaacttattcctaaacttttggcacaaggcttatttatgcatcatatatagaggataaagaaaccatgttgatatacttattcctatacaagatactgggaatcatgctatcagcaaacatatctgcaccaaaaacatatggcaaaggaagaacgtcagggtagcaaatttaaaatttaccagagcagatctcagtcggtaaccaacacgcatgacattctggaaatattgagcttcacatagcaccccgaacacctagaaacgttgtcatcaacatcagtcactcgatgagtttgtagctttaaagtatcaccctacactagataaagtcagaacctatctaacagacgcaaaaaatccaagagcaacaaaatcaaaaagtggcattaggggacatctagtgttgctattataatcagtttagaagaaccttagaccaaacatacagaagtataacaagtgtcagtttcacaagttgatagaagagagtccaaatagacagagagagagagagaaagaggacttcatttcataccactccaacaaagattgagaacgcatagatgtaacccatccaagctggcgcatcctcttgcattgactgtatatagtttgacatacaaaatgagagatattgtcagataagaatattgaaccaataataggtttccgaatctgccaagaaaagaacaaacctttaagagttgattcagtaaaagaggtcccacaaactgtgagcaatcattcccgatctgtgcatacaaatgtaaataaatatgttcaagtacaatgaattagataaagaaaaactaagaacccactagttccttctaataatctgtaacaccatgtaaattataaatgacttccacgtgacagaaggttatccaacatgacgcagaacctgtgatcatatgaataaaagagaggaaagactctggaagcacgaataaaagagaaagaggtagacgaaaataccttccaaaatcctccccaccaaaacctacaaaattcaaaaaattagatccccatacgacatgtagttaacaaacgaaataatgcttaagcaatatgaaccaagaaaaaaaaacatatttaaccaatctacagtaaaagttgtatcccctatgtcttaaatttataagagtacgaaagcaagcatgattgcctatgataagatggaaatgtgttaagctgctatagcaaacaactaacattaaataagtagaaatattctgatcttgcttcctacacattctaaaaacctgatggttctttcaagagatcacttaaacatctgcacatcacagtgaaatccagcactatctaatcatactcaaaactcaaaagagatgagaacacagcacgataaggtgagaaaatctatctaccttcctcccaggctattgttcaatgctctcaacagccacggttgcggcttttgtagttccttatcccaggaatgctggaaactaaaaaggatacagaaaatatcaaatagccaattcagtaatatacattttaagagatataattattgttagaagtacctcgtgaacagagtttcagtctgatcccaagtgtctagataccacacatccttctctgttagaggccttttagatcccaaagtcatcaagggattcatccatgagaagaagatttctgtgaccaaacaaggaaattggaagaaggaaatcaggtgaaatttcaaaacctaaatccccatgatcaatctgaacaaaagtcagagacgatgtttgcaaattatgattactaattataagtttcagccaggcgaccaaatgaaaatcatgtagagtgacttactgtcaaatatatttgcatgcttctcagggcatatttgttgtccatcagaaatctcttcatactcataatcatccacagtttcactccgcactggcatgtagccagggtaagtatccaaattgggaagatgcataaacaagagaattccaaacagaacctgaagtaaaaccaaaattcaccctcttaagatgttagaaaacaaactgtatcggattctgatttataatcatagcacatgctaggattctggactctctaaaggagtccaagtgagctaacctgagctcccacttcgcttgtgtagagatacagaacataactgcaatgaaaacaaaacatgaattcaccctgtagaagaagaacaatgacttcaataaaccaaagtaactccaaaattgtaccaacctgctatagtactccttgactgagagaacaagatttaacaagaccatatcccccacaagagcatatatgacagcaaacctgacataccaacggagttcacggatgtaaattttagtttccattaaaatcatgaccattacagcgccccaagcaaaagctttgacacccaatccgaatgcctgccaaagaaatcacacaaacaatagcatgtttcaggtaaaacatacacaacaaactaaaagataaagaataaggaacagaaaataaagcacctcaaaaggaggaagtccaggtccatcaaaatctaaaactgaaatccccatgatcaatctaaacaaaggctcagcagtagcatacgcagccaacaaagccaggaaatagttatacaatcttgacctcaaacagaacctctccaccttgtgatcctttaaggcgagccatatacgatacaggcacagaaccaacagaaccagttgagagataccaagcacaaaagagtcagtagcacaaggcgtgtatgcaccaaatgcattagccacttgttttgtccaaacaccattaggcaccggcttacaataccattcaataaactcaaaccccatcgttatcctttcctttccctcaaacacagtgcatcacaagctaccacaccaattccctaccctgcaaagaaaatcaacaactttgaaatgagcttctaattccaaaaaaccatagcaacaaaaataataaattttcataactttaaaaagtcataaatcaatcattatgtgctcaagtgacaagaaatggacccagagtgcgaaagataataaatacattcgcgcgtaaaaaggggcaaaattgcatttaatcatatataaaagatagaacagtgacaagcaatcacaacgagaacatagaagaatcatcaagagtcaagactacaagattgagagagctcaagtgttttccatacgaaaaaaaaaaaactttgaaacgaatccataattttattatcacgaaaagactctgcatttaagatggtatcgagtcaaataacacaaatttgaaatccatgaaacaaaactatcaatcccactttacaggaaaaagctacaatggagaaaagggagaataacaaaacagagaaaacagagaaaaagggagaagctt
